United States Patent Application Publication US 2023/0172999 A1 - sequence listing, part 15

SEQ ID NO: 14 - DNA, 2966205 bp, Faecalibacterium prausnitzii (residues 1,483,104-2,966,205 of 2,966,205)
  misc_feature (161170)..(161179): n is a, c, g, or t
  misc_feature (383065)..(383074): n is a, c, g, or t
  misc_feature (430173)..(430182): n is a, c, g, or t
  misc_feature (1093868)..(1094026): n is a, c, g, or t
  misc_feature (1170393)..(1170402): n is a, c, g, or t
  misc_feature (1446581)..(1446590): n is a, c, g, or t
  misc_feature (1474504)..(1474513): n is a, c, g, or t
  misc_feature (1560403)..(1560412): n is a, c, g, or t
  misc_feature (1749924)..(1749933): n is a, c, g, or t
  misc_feature (2189109)..(2189118): n is a, c, g, or t
  misc_feature (2217052)..(2217237): n is a, c, g, or t
  misc_feature (2218243)..(2218252): n is a, c, g, or t
  misc_feature (2221953)..(2222026): n is a, c, g, or t
  misc_feature (2305635)..(2305644): n is a, c, g, or t
  misc_feature (2362276)..(2362285): n is a, c, g, or t
  misc_feature (2431131)..(2431140): n is a, c, g, or t
  misc_feature (2452742)..(2452751): n is a, c, g, or t
  misc_feature (2477741)..(2477750): n is a, c, g, or t
  misc_feature (2495242)..(2495251): n is a, c, g, or t
  misc_feature (2546162)..(2546171): n is a, c, g, or t
  misc_feature (2550908)..(2551080): n is a, c, g, or t
  misc_feature (2656520)..(2656536): n is a, c, g, or t
  misc_feature (2816876)..(2816885): n is a, c, g, or t
  misc_feature (2824352)..(2824361): n is a, c, g, or t
  misc_feature (2964451)..(2964682): n is a, c, g, or t
cagccctctctctttttgccaaagtttcccttgtcttttcttgcaagttgccgaaagtagcgtattctcaaaagttcgcgtttgcgcagcgtagcgcagcaatgaaagccccagtggggcttttaagcgacagaacggtcttgcgtaagcaagatggaggggcccgccccgacaagttcgcgtttggtgtaagaatcgggcgtgtggtggatgagtgcagacctgtaaagggctacatcagaaagtggttttatccgatcctcccatgcggtggtcatcaggacgtagggctcctctgccagctcatggtcaaagcttgcgcggacgcggacgatctcatcggtcacaaagcagaccttgacattagcgttatcagtatgcagcaggaaagcgccgttcttgcgctccatgccggtaaaacgggagcagatctccatagcttttactcctctcagttgatttttgataaaaaatgcccccattccccttcagatgcaggatatcttcagagaaatgggggcaacgtattcgttgctttacccggaacagtcagggattagaacacccagcagcaccagtgtactggtcgcgcgcggtggcctaccttcagacccattatcaggacccgacccttaccaccgccaagggctttacgccagccgggagcacctttcccgtgcgttcaaggagtgcaccatggagagtatccacaactacctgatctatctgcggatgcagcactgccgcaaggcgctggaagagggcgtttccgtcctgaatgcctgcaccgaaagcggctttccggattacagcagcttcctgaaaaccttccgccgcctgtacggcatcacccctgccgaataccgcgcacagcaccggacaatggtgcgttaaaagctgcggcaggagaatacgaaaatttttctcaaaaagggttgacattctacccgctctgtggtattatacttgagcagtcagcgagagccgctgaaaagcaaaaaaagtaaatatcgcggggtggagcagtctggtagctcgtcgggctcataacccgaaggtcgttggttcaaatccggcccccgcaaccaccaagcaggttgaatttttaaaattcaatctgcttttttgtgttcacatcaaagtgggaagcgccgccctcgctgcgggctgcgcagccgaagtagtatgtgtttgtcatgcttttatcatactgtttttgctttggaagagttagaagatcttcaaggtaaaaacggtcatttttgcaattttgcgcgattgcgtctgcaccgcatccggaggatatcgtgcttgttgcccggcaaaaagaataaaactttcccattttataataagaacgttctggcaaagaccgtctttttctgttatactctagccaatgaatacagctgtaacaggaggatgttatggaaaagaatgtactgaacaccgatctcaccggcaaggtggctgtcgtcaccggcgcaagcgggacgctgtgctccatttttgccaaggcgctggcacgggcgggcgcaaaggtggcgctgctgggccgcaacatggataagctcaaggagcttgcggacaagatcgaagccgagggcggcaccgccaagggctacacctgcaacgtgatgaacaaggccaactgcctgcaggtagccgaggatgtgctggcggactttggcccctgcgatatccttgtgaatggtgcaggcggcaacaacgcccgcgccaatacggacaaggaatattttgagatggccgatctggaaagcgacaccgtcaccttttttgatctggacgagagcggcgtggagatggtgttcaacctgaactttatcggcaccctgctgcccacgcaggcctttgcacggcagatggtagggcgcgagggctgcaacatcctgaacatttccagcatgaatgcctacctgcccctgaccaagatccccgcctactccggctccaaggctgctgtgaccaactttacccagtggctggcggtgcatttcagcaaggtgggcatccgggtcaacgccattgccccgggcttttttgccagcgagcagaacgcaaagctgctcttcaacgaggacggcacccccaccgaccgcaccaaaaagatccttgccgccacccccatgggacacttcggcgacagcgagaaagaccttgtgggcgcactgctgtttttgctgaacaatgatgcagccggtttcatcaccggcatctgcctgccggtggacggcggcttctcggcttattccggcgtgtaataagtactgcaaaatatacaaaaccacccctgcctctcggtgcagcagcccggcgggacaggggtggttgttttcagcagggttgaacaaaaggcttcccccggccgggggaagcctttatgcggaaaaatgaatttctatgggttcacttcttcgggtgctttttgcgccatgcaagcgccacggcaacagcagcgcacgccagcactgccagcggccagacggaggccagcgccaccacaaattgctgcaagccattcacaaagttgccccagccggagacaagggccgtgccgatgcgggagaagaagccctcgtcggcgggtgtgtaggtctgcacctcgttcaggtcgatatacacggtgcactgctgcacctgatcgctgtaccagtccaactggctctgccagctttcgatctgggactgcacctcggtgagagagtcctcgatctgcagcaagtccgaaagagtttcggcttgttcctgcaattgctgtaagcgggtgcgctgtgcctgcaggttagaaagccgcgcggacacgtccatatactgagtggtcacatcatcggcctgctggctgcgataggtcacattaccggcagcggccacagcatccagaaagctctggtagttggcctgcggcacccggtaggtcaggcttacggagcggctggaaccgctgctggaatattcgctgctggattccagatagccgcccgcctcggcaagagcgctgtccagcgcactgcgggctgcctcgtagtccttgctttccagtgtcaggttggcggtgtagatgatcttggcactgtccaccgcaggggcagcagcctcggtgctgccggtgccgctgtattccgtttccagagagcggtcgcctgcctccagactgtaattcaccgcctcgggggtgctgtccagcgcggcatgctggagatcaaacccgcccgctgccacagaagcagcggagctgtcggcagagccttcggctgcgtacagagcgggtgcgctgctttttgcgctgcccatcccgatgcccagatgcagggtgctgtaacccagcacgcacacggccagacaggcagccagcgtgcccagctgctttaccgggaagtggatgggctttttcttcttggcttcggtgttcaggggtgctgcgggtgcagcggtctgcggggcaggggcagccatcatgggctcggccttttcctccgcggtcagggtgtcggtcatggccagcagttttgccttcagatcgtccggggcagtcaggtcatcgacctccatcttatattcataccacctcatcttcgatctcctccttcagcatcgtatgtaactgtgcccgtgcgcgccgcagccagcttagtaccgtgtttgtgggcactgccatcatccgcccgatctctgccgtagtgtatccttcgtagtaatgcagatagatggcattgcggtagttttccggcagggtgcggatggcatccagcacgctgccgtcctccgcaaggacatcaggggcgggcaggttctcgtccagctcggtgtccttttggtgggcggcgcgggtcaggtcccggcagcggttgatggccacccgcagcagccatgctttgagatgctcctcactctcaaagatgccgttgtagtgcagcagtttttcaaatacatcctgcaccacatcctcagcatcggctgtgcagcggcaattatgtaccgcagtgcggtagacggtgtcgctgtaacgctgcaccgccaaggtaaatacttcgtttctggtcagctgtcccattgttataaactctccttggatgcccggaagcgggcttctcgatggaatgtttgtggttctcacggggacgttcactcaatatacggctcagcatccccgattattgcagaacaaaacccggatccttccattttttgtgtaccggacgcaccggaccgcaaggtgtgtccacgttctccgacaggggttggatatcctgccggtttaccggtcagtataccacggaatcgcagaaagtaaaagaggggagggcgctccttctttatttatagaccctttgcagcagcgccagccgctcggagagaaaagtctcggccttggggtgatgcagccagcgtttgccatcggtgctgtgcaccagtttctgcgccagtgcggcaggggcggtgtcgatggccattacgtcctgcatggtcagttgcagggtgagcgccgccggaacatccggcagcggcggcagcgggtcctcccacacaaagggcggcagcagctgcaccgccacggtcaggcgggtacattcctcggtcagcaaaagggcggcaggggtgccgtccggctgcacctgtaagctgctgtataaaagctgcatccgggcaggggagagcagccgggtcaggccctctgccggagcagccgcaagctgtaaatacccggcggcctcctcccggtagatgcgccgggcaggggcttgcagccctgcgtagagggcgggcagcataaagctgccgcttttttccagcgcctgctgcgccagcagatagaactcggtcagcgggtacgccgcgtccggctgcggcatcccgaaatctggccgtgatacatgacctccacccatgggaacctccttgacaaaacacgatggtgcgattatactataaacagaaggggcgctgactgcaaaggtcagctttccatcccgcattagtcaaaaagattgaccgctagtttggtagactggggcggtcaatcttttttgttgtcatcgtttttcttctgcgaagctttatccatgacctcaagggtcaggcgaattacctcaatgatcaatcccaacagcgtaagaatgaccatcagcaggttcagcatctccgacagatccatctgacatccctcccttcgccttcagggcttggggaggcttggctcaaaaaagttctcctcccacaagccgctggttcgttccatgtacaggaagaagcagtgctgcgggatgggaaagcatgaccaccgattatgcaatcagcgccgtattcttagaatatcatattttttgacggattacaatatatctattgattgtaaaccctttgcaaacttttccgttgacctgtggcgtaccggtgcggtatactcgggcacagatgccttacaaaacgaaaaaacagagggaaaactgaccatgaaagacaaaaaactgactacctatcagatggctgtcaccgcggtgatggctgccgtgctgtgcgtgctgggcccgctgaccgtgcctatcggagccgtgcccatctcgctggcaaactttgttatctgcctgaccgcatggctgctggggccgaagttcggcaccctgagcgtggttatctatctggcactgggcgccatcggcattccggtgttctccggctatggtgccggccttgccaagctggcaggccctaccggcggctatctggtgggctatctgctgctggccttcatcggcgggatgttcattgaaaagagcaagggcaacccggtggtctccgctgtgggtctggtgctgggcgatgccgcctgctatgtgctgggcaccgcatggttcgtgttccagatgcagtgcgagctgggctacgcactgaccgtctgcgtctaccccttcattgcgctggatcttgcaaagatcgtggtgtcctgcatcgtgggtgcgctgctgcgtaagcgcctgacgcaggcaggcgtgctgaaactgcagaatgcagtttcggaatgattgctaagcggaaaattattttcagatagaataagcccggagggtctgcgaaccttccgggcttatatctttattcctgatatcccaaggtagccgccatgaccgccttgatggtgtgcatccggttctcggcctcatcaaacacgatgctctgggggccttcgaatacctcgtcggtcacctccatggcgtcgcggccaaagcgctcgcccatctccttgcccacggtggtcttgtggtcgtggtaggcgggcagacagtgcataaatactgcatccgggcctgcaatattcatcagatcctgattgatctggtagggggcaaggtcgtggatgcgctccgcccacacctcaaccggctcacccatggacacccacacatcggtgtacagcacgtccgcgccctttgctgccttgacgggatcctcctcaaaggagagggtcgccccggtctgggcggcaatggcctgacactgctccaccagtgcgggatccggctggtactttttgggggcgcaggcggtaaagtgtaagcccatcttggcgcagcccaccatcaggctgttgcccatgttgtagcgggcgtcaccaaagtaaacaaagtggatgcccttcagatggccgaaatgctcctgaatggtgaggaaatcggccaggatctgagtggggtgaaactcgttggtcaggccgttccacaccggcacaccggcgtagtgcgccagatcttccacgatctgctggccgtagccacggtactcgatgccgtcaaacatccggcccagcacccgggcggtatcggcgatggattcctttttgccgatctggctgccggaggggtccagataggtcacttccatgcccagatcgtgggcggcgacctcaaagctgcagcgggtgcgggtggaggtcttttcaaagatcagggcaatgttcttgccccgcagctggtcatgacggataccggccttctttttggccttcaggtcagcggccagctccagcagctgcccgatctcggcgggggtgtagtccaatagcttcaaaaagctgcgatttttcagttccattgtatatttccctctctatgcaaacactcttgaatatttattcaagccatgattctattatagtacgttgcatcgggaaggtcaagagggagcttacagctccagctctatccggcgtccggtgggcttatagggggtcagccggataccggcgtgttcgaacatgaaccgcgctgcaatgctggaatcgctgtcgtggtacttgtcgccgtagtacaccacctcggcaatgccggactggatgatggccttggtgcactcgttgcagggaaacagagtcacatacacccgggcacccttcaggttgttgtgggcgctgttgagaatggcgttcagctcggcgtggcagacgtacatatacttggtctgcaggggggcaccctcccgctcccagggcatctcgtcatcgctgcagcccatgggcatcccgttgtagcctaaggaaaggatcttgttttccgggcttacgatgcacgcacccacctgactgttagggtccttggagcgcatggcggtaagcagcgcaatgcccataaaatattcgtcccagttgatataatcctcgcgcttcatcgcgtaaaacctcctgcctcttccggcgggtctgcggcttgacaaacccggaaaaatagactatactacgaatagaaagagcgctgactgcaatggtcagctcctcatccggctaatcagtcgtaaagaatgaccgcttgctttctgagggcatgagcggtcatttctttttgccgttggaaatcgtccatgtgatctcgaaggtaatgtagattgctccgccaagcagcgtgagcaacagcacgacctgttcaaacgtcatgaggcatccccctttccgctttcgcgtcaggggaagcaaaaagtttttcgtccccctctggcgcgcagccggaaggagctagaccaccgattatgcaatcaacgcccttaccgccgaagcggcacttacagcataccacaaaaaccgcatatttgcaacgaaaactcccggctccgcgcctgtacgcgctgccgggagttctgctttttctacccacccgttttgcacccgaatgtcaacttgcacaaaacagtgcccggaagtttggcaggcgtttttgccaaattttgaaacgatatatttaaaaatcgtttcgagtgtggtattatctttgtaaaatatgccacaaaaacggagagaacgctccgtgcggcggaaatgagggaaaaaccgatatgaaatacgcaagcaacaacatccgcaatattctgattgccggccatgccggcagcggcaagaccacgctgaccgaagcactggtctatttttcgggcgctgccgagcgtatgggccgggttgaggacggtaccacgatttcggactttgatcccgaggaagcaaagcgcaaggccagcctgtcggcgtccgttgtgccggtggagtacgagggcatcaagtacaacctgatcgatgcaccgggtctgttcgactttgaagcaggcgagtacgagggcatccgcgccgccgagagcgtgctggtgtgcgtgtccggccgcagcggcgttaccgtgggcgcagaaaaggcgttccagctggcccgcaagaacggcaaggccaccatggtgttcgtgtccaagtgcgatctggaaaacgccaactacttcaagatccttgaggatatgaagatccgcttcggctccaccgtctgcccctgcgtcgtgcctgcaaagctggatgacggcacccctgtgtacatcaacctgttcagccagaaggccttcaagtacgagggtggcaagcagattcaggtagacctgccggacatcggccaccgcttccagggcctgatcgaggccatgggcgaggccattgcagaaaccgacgatgaactgatggaaaagttcttcggcggcgaaccctttaccaccgaggagatcgtggagggtatgcgcaagggcgttaaggacggcctgatcacccccgtgttctgcggcagcgccgtgaatatgcaggcactggatatgctgctgttcaatatgcacaagctgctgcccagcccggagcacgaggccagcacgctggctgaggacgccaacggtgagccggtggaactgcactgcaccgaggatgagcccactgccgcctacgtctttaagaccgtggccgacccgttcgtgggcaagctgagctatctgcgtgttatcagcggcaaggtgaccgcaggcgaaccgctgaccaacgcccgcaccggcgaggtggaaaagatcacgaagcccctgaccgtccttggcaagaagcagatcgaaaacgacggcatcggtgccggcgatattggcgcagtggcaaagctggtgagcgcaaagaccggcgataccctgtgcgatgcagaccgcgtggtcaagctgcccgcccctgtgttccccaagcccagcctgttcatggcggttaccgtggccaagaagggcgacgagggcaagatctccagcgcactggcacgcctgatggaagaggaccccaccctgtgctacatcaataacgccgagacccatcagcaggtcatcggcggcttgggcgagcagcatctggacgtggtcaaggccaagctgaagaacaagttcggcgtggagatcggtctggaagctccccgcatcgcctaccgcgagtctatccgcaaggcctgtcagaaacagggccgccacaagaagcagaccggcggtcatggccagttcggtgacgttatcatcaactttgagccctgcgacagcgagcaggtggtgttcgaggaaaaggtgttcggcggcagcgtgcccaagaacttcttccccgccgtagaaaagggcgtgcgtctggctgccgaaaagggcgtgctggccggttaccccgtggtcggcctgaaggccaccctgctggacggcagctaccacccggtggatagctctgaaatggcctttatcatggctgcaaagctggcctacaaagctgctatgccggaggccggccccgtcattctggagcctatccacaccctgaaggcccatgtgccgaacgacaacaccggcgacatcatgggtgatgtgaccaagcgccgtggccgtgtgctgggcatggagccggacgaggacggcttgcagaccatcattgccgaggtgccgctggcagagcttgcaaactttaccacctttatccggcagaccacgcagggccgcggctggttcaccaccgagtttgcccgctacgagaccctgcccgagatgctggtgcctgccgttgtggagcaggccaagaagctgggcaatctggacgaggccgcagacgactgagccctgaacccctgatttgacattttcctgagcccccgccgacacttttttccctctgtcggcgggggcttttttgcgtaaaaatggaacaccggagcgtccgcagatgctccggtgttccgaaatgataaaaagttttctgctgaaaaatgctctggcgttacacgccggaagcaccatagtttgccagcacgcgggcagaggggtcgttgacgttgcagcccggccatgctttgtttggcatccagaagcctacgatggtgcggctctggtcgtggtagtacttctcaaaaatttcgcggtagaacaggctttccttggtaaagggcatgcagtgtgccgagtagtttgcccggcgcatctggaactcctcgtcggtgtacaggctctcggcgtactccttgatgtcgtccaccatgctgtggcccacggcgtccgagaaggcggccttttcgcgccacaggatctccggcggcagccagtcgccctcaaaggccttgcgcagcaggtacttgcccttgccgtagcggttcagcttcttttccgggtcgatggccatgacgtagcgcacaaaatccaagtcgccaaagggcacccgcgcctcgatgctgttggaggagatgcagcggtctgcccgcagcacatcgtacatgtacagctcccggatgcgcttctggctttcctgctggaaggcgtcggcggtgggggcgtagtcggtgtatttgtagccgaacagttcgtccgagatctcgccggtcagcagcacccgcacatcggtctgctcgtggatggccttgcacagcaggtacatgcccatgctggcgcggatggtggtgatatcccatgtacccagcagccggatgacctcttccaagctgctgagcaccatctcgcggttgatgatgatctcgtggtgctcgctgccaagatagtccgcagtctgccgggcgtatttcaggtcgatggcatcggtgtccatgccgatggcaaaggtgcggatgggtttgcccagctttttggcggcaatggagcacaccaaggaagagtccaacccgccggaaagcaggaagcccacgggtgcatcggcgtccagccgcttttccacaccggcgatgagcttttcgcggatgttctgcaggatggtgggcatatcgtcctgcatgggggcgggcacatcggcaatgtcctcgtagcgcacaaagcggccatcgcagtagtagctgccgatggggaagggacggatatcatcgcaccagccgatgaggttgcgcatctcggaggagaaggcaatcttgtggctggacttggagtagccgtagaacagcggacggatgccgatggggtcgcgggcggcgatgagccgatccttgcgggaatcgtacaggatcagcgcaaactccgcgtccatgtggcggaacatatccagcccgtactcgtagtacagcggcagcaggatctcgcagtcgcagtcagagcagaacttgtagccacggcgctttaagatctctttttcgaaccggaagccgtacaactcgccgttgcacaccacgcagtcagcgccccggtaaaagggctgcatcccctccggggtcagtcccatgatggcaagccgcccaaaacccatcaggccatagggaccctccaccacgcgctggtcgtccggcccgcggtccacggtgcgcagcagatactctttgaatttttcggcactcaggtcgtgccccgtataacccataacacaacacatacttcttacccctcttaaaataaaaaaatacggcagcacattcatcccatagtcctaggacgaatatgctgccgtatccgtggtgccacctaaattaccggcatacgcaatacgccggtcacttttgtgcgctctccccgttgaaagcactgccgcgataacgagcggcgcacgtctgcccctactgctacacacgcaggttcagggagcggctcacgggtgttcttcgggcttcgttttctgcgcggcttccaccgtcccgcactctctgtaagaaaaacctgaggccttacttttcccggtcaacgcttttattgtttgcattgtatcacgggtttttgtccgtgtcaacacagcaggcgcatttttttgcaggctgttcttccgctgcggacggtgccgcattttgcgcgcaatgacggcacagcccgtacagcacactgccctcgcattgcagggtaaagccgtgctccgccatcaggtgggcgcgcacttcatccataaaatggcagtccaagtgatagatgcgcccgcactgcacgcacttgaggtgcaggtgctcccggcaatggcgtccctcgtccacatactggaacaccgcccgctcgcctttatcggctacatatttcataatgcgctgctcgccggcaagcttgtccagatagcggtacacggtggtggggttggggcttgcgccctgcgcctccagatgctccagaatgttggaggcgcttaccgcgtgctggcagttgttgatgaggtaatctaagatgagttgccgggtgcgggtgttgtagccatcgcttcgtgccatgagagtttcggtcctttccggtgtagatgtgttgttttttacccctattgtagcacagtttgcgcttggatgcaaaagaagcgggcggaaagtcggcctgtttggcgacaagcacaaaaaacattgtaaaaagtagcaaaatcgaggcgtaatctttgtataaaacggaaaacactccaaagttaagcaaaaagtcttgtaaaaaatgccctgatgtgaaataatgtattagataaagtggttggattgcagccgggatacaagctggctgaacatgaagaagaaaccggcagcggtgggtttgcgctgccggttcggacgttttggaacgttttttggagaagaagaataggagagtgtgcttatgaaagagcaggacgcacaggcaaagctcagcctgaagctgcaggcgtaccagtacctcaaaaccaagattttgaactgcgagtaccgccccaacgagtttctgaacgagcagaagctctgcgccgagatgggcaacatcagccgcacccccatgcgggatgcgctggggcgtctggagcaggaggggctgatcaccattctgcccaaaaagggtctgatggtctccggcatcaccgaagaggacgtgcacagcatgtttgagatgcgtctgctggtggagccctacgccctgcgtacttacggcaatgccatcccccgggagcagctggaggcctacaccgaactgatgcaccacagcgagcgcatcgaggacttctgcaagtcggacgacgacttccacgagctgctgatgagcaccctgcccaacaagtatctgcgctctgcctacgaccgcatcaccggcctgaacacccgcttccgcatcatgaccggcaaggtgagcatgatcaatcaggagcagacctgtgaggagcatctgcagattctggatgctgcgctggcaggggactgggacggcgctgccatggcgctgcagcaccatctggaactggcccgcgataaggccgagggcgtcatcaaggtcatccgcctgtggtaaaagaataaaaattataaggtctgctgcaccgcacggtgcagcagaccttttgccttttgtcagcagaacgattcagaatggccgccgcgtgcgctttggccataatcagcggaattgttatttataatatacgaacagccaagcctgcgggcttggctgttcgacttttcacaagaggagaaaaacggcaggcttatttctccaccttgctcagcaggatacggtcattatccagatttttgccagcattctcgcggaacttttccagcagatcgtccacggtcatcttgctgcgctctgcaccctttacgtcaaacacgatgcgtccggcgtccatcatcagggtgcggttgcccagttccagtgcctgatgcatattgtgggtcaccatcaggcaggtgatctttttctcggccacgatactcttggtcagcgtcagcaccttttcggcggtggcggggtccagcgcggcggtgtgctcgtccaacagcagcagcttcggcgtgacaagggtagccatgagcagggtaagcgcctgccgctgcccgccggagagcagccccaccggctgcttcatgcgatcctccagccccatgtccagcagggccagcttttcgcggaagagcgccttatccttgcgggagatgcgggagaagatggcgttgggcgcagtgcctgcccgcaggtaggccagcgccagattttcctcaatggtcatgttgggcgcagtgcccttgagcgggtcctggaacagatgcccgatcaccttgctgcgctggtgctccggcgcaaaggtgatgtcctgcccgcccagcagaatgctgccctcgtcggcaataaagccgccggtgatggcattgaacagggtggatttgcctgcgccgttggagcctacgatggtggcaaaatctccggcttccatttgcaggctcaccccatttagtgccactttttcattgacggtgccggggttgaaggtcttgtgcaggtcgttcagctgcagcatttccatgttactgtccctccctgttggtcacggtgcggcgggcacgggcagcgtgccgccgcttttcaaaggcgaagtgctcccggatggcgggcatggagatggccactgccacaatgatggcagaaaccagcttcatggcggcggcgggcacgttgaaccgcagcgccaccgccacgataaagcggtacaggcagctgccgaataccacgcccagaatgcggcgcagcatggtgcgcttgcccaccagcgtctcgccgatgatgagggaagccagtgcaatggtcaccatgccggtgcccacgttgatatcgcagcttttctggtactgcgccagcagcccgccggacagcgcacacaacgcaccggatacgcacagacccaccgtgatggtaaaggcggggttgatgctggaagcccgcaccatggcggcgttatcgccggtggcgcggatggaaagccccagccgcgtgcccagaaaacccagcatcgccgcgcaggcgatggcaatgataactgccgccagcgccagcttgtaccagctgcccagaaagcccagcgaagtttttgccatggagaagatggtaggggtcttgaccagtgacatggtggaggagaagcccatcaccgccagattgatggtgtacaggccggtgttgacgatgataccggccatgatgctttccaccccgagccttgtctgcagaaaggcggtgacaaagccggagcacacccccgcagccatggctgccgccagcgcaaggatggggtggccggtcagtgctacctgacaggccacggcgcagcccagcgtaaagcagccgtcggtggaaaggtcggcaatattcaggatggagtagctcagaaacagtgccaacgccaccagtccgtagatgcagcccagctccagcgctgtctgcaaaacgttgagggaaaagatactcgccagcatggtgtatgctccttttatgttattttgaatgcgcactgcattgctctgcggagtgcgacaaacgcattttcacgggagagggaaaccactttccccagaaccgccaaaagctctcccttgcgggagagccggaaaaaccgtcaggttttgacggagcggggtgctcaggagaagctctcggcggtggtcacctcggtgatctcggtgcagtagggcttgaaagcttccttcagggcagccagatccaagcccagagcctcggcggtctcggtgttgatggtgacgatgccgttatcaaaggtctggtagggcaggtctgcgggggtcttgccgtcgcacagcagctggctgaccatatcggcggtagcttcgcccagctggacgtaatccacgccgtagcccaccagcgcgccgttcagcgcaaagctgtcggcaccggtgtagtgctgcacaccggcctcgatgaagctttcgtagatggacaactcggcggtcatgatggtgttatcggtgggggtgaacacggccttgactccggcggctaccagtgcctcggcagccatctgcacttcggcggtggtggtgccgttcttttccaccaccttgatgccgttcttctcgcagaaggccttggcgtccgcaatggcctgggtggaggcatcctgactcaggtcatacagcagaccgatggtatcgatgccggggtttgccgccacgatcaggttcatgatggcgtcggtgttcagggcatcggaggtgccggtgatgttctcctcaccgtcaaagcctgcggcggcgggatcggtcacagcggagtagaccaccgggatgtcggtatcctccacagcggccagcatagtagcggcggtgggggtggccacggccacgatcacgtccacgccgtcagccacaaggtctgcgccgatctggttcaggttggactggtcggcttgtgcgttggcgtagtaatcggcgtagtcaaaggtgacgcccttctccttgccgatggcatccagacggctctccacagattccacgatctggttgagggaggcgtggtccacatagttgacgatgcccaccttgaaggtctcgccagcggcagcggcgctgccggaagccgctgcggaggaggagaccgctgcactggaggcagagccggaagcagcgccggaagcagcgccgccgcagccggtcagtgccatggcagaaacagcagaagcagccagagcggccttcaggaagctgcggcgggagatcatgttcaggtttttcatagtggtaactcctttcccggagcgggcggcaaatcaaaagacccgctccctttgcgggacgggtcttaaaacaaaacgaccctgtccctgtgtgttatccacaaggacaggatcggtaaatacgattctgcggtgccaccttgcttgctctgcatccaatacagcagagccactcacggagagccaacactcccctgtcctgtaacggagacttccgtccaaagctactggggtttgtgcccgtttgcccggccctcggcggcccacgaaactctgccccgctttcgcccgtttgcactgtccgggctcactgcagatgcgctgtgcaggttctcttccgcctcatcggtttgattgcattatacactttatcttcgtaaagtcaagagggatttttaaatttttattttttggcccggtcaaagtcattcttctgccggggcaccggtgctgcggcgcttgcggcgcacaaagtaggcaacgtacaccacccacaccgggatggccactgcggtcaccacccggcttgcggaaagcccggcggcctgatacacaaagtcgatgctgcttgcgcccgccgggcagagcaccgccatcagtccctcgtccacacgcaggatgtcggccttttcgccgttgacataggcggtaaagccgtcatcgtagggcacagagaaaaagacgaggttcgtcttgtccaacgtgatctcggcatggaagcccgcgttgttcatctggaacaccgagcagctgtgggcgcggcggtcggcgcagtcctgcgtgtagctgtcgtagtgcagatcgtccagcatcgcgtccggcagctcggtcaggtactgaccgtatgcctttacgtcctcgtcctccagcaccagcgcccgcagcagcagattggagcgcagggtcttgaccgaggcctcataggtagtcttggtcacatagtagtcgtaggtaaagcccatgggaacgtagttatcgttgtggtacagcgtgtagccgtccacgtcggcaagataggtccagcccgcgtctgcctcgtcctcaaagctttcgcgcttttccggggtggtaatgaggtactccacgctcaaaaggccgcgcagggcgtagtttgtgatctccggctcgctgcgcacgtcccgcttgacccccagccccgggtagaagctgaggatgctgggagccgccgtgctgccgaagtattgcaggcagctcttatccagccacatcccgatgttgtcgtggatcttgtaggtgtcgattcggtagtcgccctccggcaggtcgtttttcagctgcagggcattggtatcctgttccacaaggtcgctgtcggtgtgccactggccgaacttgccaatgccgatgtgcaccatgctgaacacgcaggcaaacaccagcaccgccgccgtcatgcgctgggcaaagcggctgttctgccgccatatgccgcagaggtagcggtacagtgcaagccccagcagaccaaagcccagcacgacaaagaactgttccgggttcttcagcacgccgaaggaccatgtcccggtggtatcgtcccgcacgggcaccaccgcaaacaccagcgtagccagcatgatccagccgatgccgcgggcgggggcgtccagatcaacatccgggtcctccagcgcgttcacggtcatggcggcaaggataagggtgggcatatagtaccagcgtgcgtagtagctggagttgagcgcgtagaaggcactgttcagcaccggcaccagcgcgcacacggcgcacactgccacgatgcgctttttgctgtcggccttgcggctgcgccagtaggccatggcaccggccagactgcacaggggcaggtaggccgtcatgctcgtccacttgatcacgccctccgaccagaccgaggtgaggtaaggggagtccggcggcaggatccagctgagcaggatagctagatactgctgcaccttggcgtaggtcagaaagccccagccggaagaaaggtcaatggtgcgcgggttctgcagcaggctgagcactgccgggaacagcagcagacaacccatggcaacgcccagcacgctctcccacaagagatgcccgaacttgcgcccggtcagccggaagtccttggtggtcagtttgcacacgaagtagatgcacaggaaaatgacctgtcccacaaagaagaaatagttgttgagcaggttcaccgccacccagaaggcgaacaggccgtgacggttttcataaatggcctcgtccagcgcccagagcagataggggaacagcgccaccacatccacaaagtggttgaagaacacgttgtacaccgcaaagccggaaagcgcgtacaggcaggcacccagcaccgcgtagttctcgtttttgacgtagcggcgcagatacaggaacgcgccgccgcccgccacgccgaacttgagcaccagcagcggcaccatcatatagggcagccagctctgcggcagcagcaccgacagccagaagaacggcgagccgtacaggtagaaggagtaggcgttcatcaccccgctgccaaggtcggtcgcccacgaaaaggtattgtgcggcgcacctgcaaaggcgctgtccgggtaacctgcgcccttgacgaagccgttcatataccggtaaaaggtgatctgctggctgttaaaatcgccggcatagtggaaaaagccgccgtcaagaatgtagaacggcaaaaagaagatggccgccgtcagggcgcacagccccaccgcctgccagaattttttatggctctgcccccttggggtgagcagccgtggctttttgaacttttccatagcgttcctctttctccgcgcaccggcgcggaagtggatttgatgtcaccttgtagtatagcacggcggcgcgcaagaaaaaagggcttgacaagcgcacgcggggcgggtatggtgaagaaaaggaggcgtattgccatgctgtatcccttcagcgctctgctggcgcgcatgaagtacattacccggtggagcctgatgcactccactcggccggaatccctcagcgagcacacctgtgacaccgcgctgctggcgcacctgctgtgcctcatcgccaagcactacaccggcacgccctgccgccccgaggtggtggcagtggcggcgctgtaccacgacgcgccggagattatcaccggggatatgcccacgccggtcaagtaccattccccggcgctgcgggacgcctacaaggcgctggagaccgagagcgtgcgctccatggcggctctgctgcccgcagagctggctgcagagctgaccccctgcatggacggcagcgtcctgacggcagaggagcaccggctgctcaaggctgccgaccggctgagcgcgctgatcaaatgcaccgaggagcagcgcagcggcaaccacgaatttgacgccgcgctcacgcagcagcgcgccgcgctgcaggccatgcaatgcccggaggccgactggtttctggcgcactgcctgccctgctacacccagaatctggacgagctgacgaagctgtaaccatacggcttgccgccgggggaatgttctcttttggtggcaaaagagaaccagaaaaccaccagcgatttcgacgcgctggagccacgaaaaaggggctgctcgccccttttaaccccggagaagtgggctgcaccgaaaaaaactaaagattcacgcctgttcggcgtgaagatcttttaaccgtttttttcggctccgccgatttgaagcccctcagtcgctgcgcgacagctcccccgggggagcaaggacgcccgccgcaagcgccgcgcttccgtaggaagcggcgctgcaaatgccgtttctctctacgacacctcccgtgaaaatgcaatgccggagcgtccgcagacgctccggcattgctctatttaaaatattttttccgctgaacatggctagagcacagcggaagccattctaaatcgttgttcgagccacgggcttacggaaacggtacttcccgcacatcatcggggtccaacccggccttgcgctgctcttcaaacacggcggcgatcagctcgtccaagtcctctaaatgggtcagggtgcagcagtagcggcgcagggcggcagcgcccttcagtcccttcatgtagtgcatggtctgggcgcgcgcctgcggcatagccacaaactcgcccttctgctctaccatctcctccacctgacggcgcagcgcgttcatccgcgcctgcaggtttggctccttgggggcgggcagaccctccagcgcggcgttcacccgctcaaacagccacgggtcgcccagtgcgctccgggcgatcatcacgccgtcgcagtttgtctcccgcaccatgcgcagcgcgtcctcggcgcagtggatatcgccgttgcccagcaccggcacctttaccgcatcctttacccgggcgatgatctccgggtcaatgcccggggtgtacatctgctcccgggtgcgggcgtgcaccgccaccagcgccgcgcccgcctgctcgcaggccttggcgcactccacggcggtgatgtggtcggcgtcccagcccttgcgcatttttacggtgacggggcgcttggtgtgcgccaccacctgctccacgatgcgcccgcagcggtcggggtccagcatcagcttgctgcccgccccaccggaaacgatcttaggggcagggcagcccatgttgatgtccacaaagtcaaattcgtactgctcaatggcggcggtggcctcgcccatgatctccggcacctcgccaaagatctgcaccccgtagggtgcgccgttgggcgctgccttcagcaggctgacggtcttatggtcgccgtacaccagcgcccggctggacaccatctcgctgaccgtaaagcccgcgccgtgctgcgccatcaggcggcggcagggggcatccgtaaagcccgccatagggccgaacaccgcccggtggggcagggtgatattgccgatcttcaaaggttccatgggttctccttgtatctgttttggggtagacgattttgaatgcgctccgcgttgctctgcgcatattcagcggaaaaattatttttaatttcgcgtttgccgcgctctgcggagcgctccaaacgcattttcacgggaggggtcgtgacggaagcggcagctgctttctctccatacaccgtaaaaaggggctgttgcgccaaatgctgtgcaacagcccctgtgattttatgttacatcttctcgggcacgttgatcttgaacatggtgagcacattgaagatggcgttcttcacgccgatgcacagggcaaggcgtgcctgctgcacggcggggtcagcgccctgaatgcggcagttgccgtagaagcgatggaaggcgcttgcaagatcgatgacaaagcggttgatgcggctggggtcatacttctcggcagccatcacgatctcctgcgggaaagcagccagcatccggatcagatccatctcggagggctcagtcagcagggtagcatcgatgtgctccgcaccggcaaactgcacaccctcgctctccatcttcttcaggatggagcagatgcgggcatgggcgtactgcacatagtacaccgggttgtcgttgtcggtcttgacggcctgatccagatcaaagtcgatgccgctgccggcgtcgtgcatattgaacaggaagcgtgcgctgtcgatgggcacttcctccagcaggtcggtcagggtgatggcgttgccggtgcgcttggacatacggacaggctggccgtcccgcatcaggttgaccatctgcatcaatacaacgtccagatcctcgccattcaggccgatggcatccatggcgcccttcatgcgggccacatggccgtggtggtctgcgccccacacgtcgatggccttggcaaagccgcgggtagccagcttgttgtagtggtaggcgatatcggcggcaaagtaggtgggaatgccgttggcgcggacgagtacctcgtccttggcctcctcctcagtgccgtcctcggtctttttcttgttcacggtgccgtacttggcagcgtactgggcgctgcggtacatgatagcaccgtcctcggccttatagcaggcacccagctccagcagcttgtccaccacagccagcactgcgccggactcgtgcagggtgctctcgtggaaccagacgtcgtagtcgatgcggtacttgccgaggtcgcgcttcagggcagcaatgttcttaggcagggcgtaggccaccagtgcgtccttcagggcggcaaaggcctcgctctcgaacagagcttcctcgtccatacccttgcaggcggcaacgtacttgtcaccgttcagctcagcgaactccccggccagcaccttgatgtcgccgccctgatagcactccttgggcaggggataggcatcctcaccgcagaactgctgcaggtagcgcaccgccagacttttgccgaacttctggatctggttgccggcgtcgttgatatagaactcgcgggtcacatcgtagccggaccagtccagcacagcggccagacagtcgcccagtgcgccgccgcgggcgttgcccatgtgcatggggccggtggggttggcagaaacgaactccacattgtactttgcgcccttgccgtggtcggtgcggccatactccttgttggcgcaggcacccagcacaacacctgcccagaagctctgggacaggaacaggttgatgaagccgggaccggcaacctccaccttggagaaaacgctgttctcaagggagggcagatgtgccagcagggcgtctgcgatcatcttgggagccttgcgccaagtgcgtgcaccggccatggcgaggttggaggcgatatcgccgtttttcacgtcggcggggatctccacgataaaggcgggcagttctgcctcgggcagggtgccgtctgccatggcagccttggcggctgcggtcagcagagcgcgtgcctcgtccagtgcagcctgccgggggttgtagttctggtaggtcttttcaaaatcagtcatgggtcggattcctttcacagtctcagggaacttcatcaattcacatgggtcacggtaacttccagccggttgcggctcaccagctcggcgctgtcggcatccagcaggtaggcaaaccgggcggtgccgcccttttcggtcagctgacagtcgatctcgtccgcagtcacgcccaaggtcatggagccgaagccggtctcgtagtggcacaggttgcggcggcctttttcgatcagcagctgggtaccagccccgccgcccttgccgaaccgcagcatcgccacccggctgccgtctgcggcgatcttcagagtggtggtgcagccctcgtagccggtggtctcggtctcgcggtaggtcacatagtagctgccgcccttcagcacaaggctgccccgggtcatcagctccacaaattcttctttttcttcctccgcagccggttcgtccagccgctgctcaatgcggcttttaatgcggatgatatagtcttccttcagtggcttgctcacgttgtttttccttatcaatatttatcaatggcgatctgctccaccgggccgcctttgtactcgcccagaaacaggtctgccgtctgcacaaagctgtccggcacatcgctgacgtaaaagtgtgcctgcccgctttcatggctggcacgcagcccgcgctcggcgagcatccgctccagatgatgggcggcggtcatggcggggtccaccagcgtgacgcccgggcccataaactccccgatcatgcttttcagcagcgggtagtgggtgcagcccaaaatcagggtatctaccccagcttcgcgcacctcggtcaggtactgggcaatgaccaactttgtgatctgctgctttccggcttcgctgtgatccacatacccggcctccaccagcggtacaaacagcgggcaggcacgggcagtgatctccaccccgggcaccagctgccgcagcagcttttcgtagctgcgggagcggatggtggcggctgtgccaatgacgccgatgcggcggttgcgggtgacaaaggctgcttcccgggcggcggcatccactacgccaaggtagggcaccggcagctgggctgcttccgcagccgggtaggtgctggacaccgtaccgcaggcggccatgatgcatttgacgtttttggaaagcagaaaggccacgtcctgccgggcgtactgcagaatggtctccgggctgcggctgccgtagggtacccggccggtatcgccgaagtagatgatatcctcatggggcaggcgcttgcgcagctcccgcacaccggtcaggccgcccagaccgctgtcgaacacaccgatggggcgattatccatgctgcttttccgtcctttccaccgccagtgcgatcaggcggtcgatgagctgcggcaccggcagaccctcgtgctccatgagcttggggtacatgctgatggcggtaaagccggggaaggtgttgatctcgttgatgagcacccggccggtgttcttttccacaaagaaatcgcaccgtgccagaccctcgcagttcagtgcggtgtaggccatggcggcgtaggtctttacctcgtccagcttggcctccggcaaatgtgccgggatgacggtctggctcacgccgttcttgtacttatcatcataggtgtagaactctgcaccggcaaggatctcaccgggacgggtggcaacagcggggtcagaaccgatgacggcgcactccacttcctgtccgtctacaaaggcctcaaataccaccttgcggtcgttttccagtgcaagggcgatggcagccttcagctcctcctgattggacaccttggagatgcccacactggagcctgcgttggcgggcttgacgaacaccggccaacccagtttttgttccacaccggcgcaaacgccctccagatccttctcgatctcccaacggttggcggctacccacttggtgtggggcacaccgttggcttcaaacagggcgttggctacggccttgtccatgcacacagagcttgccagcacgccgcagcccacataggcgatgcctgccagctccagcaggccctgcacggtgccgtcctcgccccacaggccgtggagcaccgggatcaccacgtcaaggtgcatcttttccacccggccgtccggggtaaacaggatcatgccgtggtcggcgcggtccgggctgatcacgcagggcatattgccgggcagctcttcccagctgccgtcggccatctgttccgccgtggcctcggtgtagagccaacggccctccttggtgatgcccacggtgagcacctcgtatttgctgcggtcgatgttgcggacaaagttgcccacagagacacagctgacctcatgttcgctggacataccgccaaacaacagagccacgcacattttatttgcagactgcatgatatctcactcctatttataaagccccggtaaaggggcggcttcaaaccggtaaaatgccgtttcgattcattatacaatatctacgcccgcgatgcaagcagaatgcaaaaaagccgccttgggacaaaaagagaccggctgcgaaaaaagtttctcaaaatcgcttttttctgcttgacggattgaaaaacgcgtggtacaatgatatcacctcttttgcggggttattaagtgcgcctgtttttatagctgccacccgcacccgagggaggttcaaaacaaccgttataatggaggtgtcaacaaatgaccgttaaaatcactctggcctgcaccgagtgcaagcagcgcaactacaacaccacgaagaacaagaagaacaaccccgatcgtctcgagatgaagaagtactgccgtttctgcaagaagcacaccgttcatcgcgaaaccaagtaaaagaaaggcggagcataatggcagacaaaaccgagaaaaagccgggctttgtggccaaagctaaagccgctgtcaagggcttctgcgcacgggtcgcaaagttcttccgcgataccaagagcgagctgaagaaggtggtctggccgtccaagcaggacgtcaagaccaacaccatcgtcgtgcttgtgaccgtcgcgatcgcagcggtagtgatgatcctgctggatgccatctttggtggtattctgggcctgatcatcggcgcctgagaatcatcttgaaacggagggtcaaccaaaatggaagaatcaaccaagctggtagatgagtccactgaggctctttggtatgttgtgcatacctattccggttacgagaacaaggtcgccaacgacctgcagaccatggtggagaaccgtcatctgcaggagctgatctgcgacatcaaggttcccgtcgagatggttcctgagatcgacaagaacggcaagcagaagatggtggagcacaagctgttccccggctacgttctggtcaaaatggtgatgaacgacgatacctggtatgtcgtgcgcaatacgcgcggctgcaccggcttcgtcggccccgcctccaagcccgttccgctgaccgctgaggaagtggagaagatgggcgtggagaaggctgcaccgctcagcgtcgattttgctgtcggcgataccgtgcagatcaccgccggtcctctggaaggctttatgggccttgtggaggccattgataccgagaacttcaaggtgaagctcaaggtcaatatgttcggccgcgagacccccgcagaggtggagatcggtcaggtcgagctgccgtaaccaaccggcaagttccgtttaccaaggtaagaccgcagtgcggttcttatagagcgtgtgcagcgtgcacgcgctcgtgggaggcgcagagacactgcgccgcaactcaccacagatttttggaggtgcatttatcatggcacagaaagttactggctacattaagctgcagatcgaggccggcaaggcgactccggctccccctgttggccctgctctgggtcagaagggcgtcaacatcatggcgttcaccaaggagttcaacgagcgtaccaagaaccagatgggttatgtgatccccgtcgtcatcaccgtgtacgctgaccgctccttcagcttcatcaccaagactcctccggcagctgttctgatcaagaaggccgctggcatcaacaccgcttccggcaagcccaacaaggaaaaggttgcttctctgaccgccgctcaggtggaggagatcgccaagaccaagatgcccgacctgaacgctgcttctctggaagctgcctgcagcatggttcgcggcacctgccgttccatgggcgtcaccgtcgagggctgagacataaacagtgggagggcataacactgcccgcatgaccacacaggaggatatacaatgaaacatggcaagcactatgtcgacgctgcaaagctggtcgattctactaaggcatacgatgtgaacgaggctctggagctggcttgcaagaccgcttccgccaagttcgacgagactgtcgagctgcacgtccgtctgggcgttgatggccgtcacgctgaccagcaggtccgcggcgctgtcgttctgcccaacggcaccggcaagaccgtccgcgtctgcgctattgctaagggccccgcagctgctgctgccgaggctgctggcgctgatatcgttggcgatgacgagctgatcgcaaagatcgccggcggcttcatggattttgacgtcgtcgtgactacccccgatatgatgggccgcgttggccgtctgggtaaggttctgggcccccgtggcctgatgcccaaccccaaggccggcactgtggctcccgatctgggcaaggctgtcagcgaggctaaggctggtaagatcgagtaccgtctggacaagcagaacatcatccatgtgcccgtgggcaaggcttctttcggtgcagagaagctgtacaccaacctggacactgtgatggaggctattgccaaggcaaagcccgctgcagcaaagggtacctacttcaagagcgctaccatcgccaccaccatgggccctggcatccgtctgaacaccctgaagtacggtgtctaatttagatttctgatgtttttctgccgttctgcggaatggcagaaaaattttgtcggaaattgaaaaaagtacttgacaacgccgcacgtttgcggtattataatcatgctgtttttaagacagcaggcgctggagtccagtgtaaagtttgaccgcctgccgagaaacgtgcgtaaagttgctttatgcctctctctcggcgcagtgcgcgggagagaggcttttttcattgctccggctttcgatacaagtttttgaaacgaggtgaaaccgaatgcccagtgcaaagattctttctgaaaagcaggcttacgtcgctgatctgaaggcaaagtttgagagtgcggtttccggctgcgtcgtcgcttacggcggcattaacgtcgagaacgacaccaagctccgtaaggagctgcgtgaggcaggcgttgattacatggtcgtgaagaacaccatgctgcgtctggcagttaagggtaccgctctggagggtctggctgagaacttcaagggcgacaccgctgttgcttttgctcacgaggatgaccccatggctgctgcccgcatcctgtgcaagtatcaggatggcgataagtccaagaagttcgtcgtgaaggctggcttcatggaaggcaaggctatgaacgccgccgagaccaacgctatcgcaaagctgcccaaccgcgaaggtatgctgtccatgtttgcaggcgccctcaccagcaccctgtctggtctggccgttgcaatgcaggcttatgccgacaagcaggaggagcccgctgcctgatggccgcgtgaccgccgcttaacaaaaaactgaaacaaactaaaaccattgatattggagggttattaccatggcttctgagaagattactgccatcatcgagtccgtcaagggcctgaccgttctggagctgaaggaactgatcgacacctactgcgaggagttcggtgtttctgctgttgctgctgctgctcccgctgctgctggcgctgctgctgccgctgaggaagagaagaccgagttcgacgtcatcctggctgaggctggcgctaccaagatgcaggtcatcaaggtcgttaaggagatcaccggtctgggcctgaaggaggctaaggctatcgttgatggcgctcccaaggctgtcaaggagaaggtctcccaggctgaggctgacgacatcaagaagaagctggaagaggctggcgctaaggttgaggttaagtaatttaaccccttctcttaccgttctttcttgaacatcaagaggtctgcaccgcaaggtgcaggcctctttttgtatctctccgtgaaaaaaggcttcagagacgcccgcaggcgtttctgaagcctaaaatcaaattccgctcaaaaaaaggctactgcacaaacctgtgcagcagcctttcgtattattcttccgttgtagccttggactcctccacataggctgcgatcttgtcgatctggatctgtgccacggcccggccggtctcataaacgcggcgtagctgggcgggatcacgctccatagagggaatctccagcgggatgggcgggcggatgacgaaggcccggccggactgctccagcatggaaatataggccagcgtctcattgtagcgctggtgccggtctgccacggcctccacaaaagcgggatagcgcacataccttgcccggataaggggcagcatcttgtttttctgctttacaaaacccttgggctgggtcaggatgatcaggttgcgcttgtagccgatagactcgaaaaagcgcacaggaatggaatccgcaacaccgccgtccagcagctgatagtggccgatcttcacgattttggccgccagcggcatggatgccgaagcctgcatccactggatatcctcggcgttgccggtgcggcacttgcggtagataggctcgccggtgcgtacatcggtgcacaccacaaaaaagtccatggggttctcccggaaagcctcggtgtcaaagggatccagtttttccggcacggtatggtagcagaactgctcgctgtacaggttgccggtgcgcagcaggttgccaaagctggcgtagcgcttgtcggtgcagtattccgtgttgtagcggatggtgcgcccgatttggtgcgacttgtagttgcagccgaacactgcccccgccgacacaccaacggcaccgtccagctggatgttatgctccatcagcacatccagtacgccggcggtgaacattccgcgcatagcgccgccttccagcacaagtcctgttttcataccattttcctcctcgtccggtcaaaaatcccggatatgacccttctcctattaagaatagtatactcaaaaaccgcgaaagaacaagggaggataaaccaaaaatgacccgacaacctcacgaagtttcggtatttttggacaaggtcatacttttagaaaaaacgaagaggtttggtgccgtatttttacgaattttggaaagaaaaccccttgtcaaagcgggatgcttccggtatactaggtgaaacattatatgatgggtgcgtgtggcgcgcgcccgggaatggaaaacaggcaggcgcttttcgcggcgggcgagccggaggcagaaaacgcacctgcaagggttggaggatatattttatgaagatgctggaagatcgtatccgcaaggacggcattgtgcgcgagggcaacgtactcaaggtggacagctttatcaaccaccagatggacatcccgttgttccgcgagatggcgcgggagtggaagcgcctgtttgcgggcaagcccatcaataaggtgctcaccatcgaggccagcggcatcggcattgcggctgtggtagccagcgagctgaacgtgccggtggtgtttgccaaaaaatccatgagcatcaatctggactacgacaactacaagacccagatccagtccttcacccataaaaagatatacaacgtcatcgtgtccaaaaagttcctcactccggaggatcatgtgctgatcatcgacgattttctggccaacggctgcgccctgatgggtctgctggaactggccgaggaagccggtgccaccgtagagggcatcggcattgctgtggaaaagggcttccagcagggcggtgagctgatccgcagcaagggcatccagctggagagccttgccatcgtggacgccatggacagcaccaccggcgagatcaccttccgtccccagccgaaccagaactaaaaattattatacatttcagcgtaacggaatgtctgcggacgttccgttatttttttgcggctgaatagcagcatttgtagcggcgctgcgggtaaaggtatctgcttgccgcaagcgtgcaaagacgctccgctgggccagaggcagggaggggtgttccgactcccccctccctacctctggactccacccaccccgcaacgggccaagggctgctcgcccttgacaatcctaaagaagaagtcgaagcacaaaaaagctagcgctgcgccagtcggcgctatcgctttaacgcttttttcgcttctccatccatagcccctcagtcgctgcgcgacagctcccccgagggggagcaagcgctcgcccgcagcgccgcgctttcgtagaaagcggcgctgcaaatgctgcttcccgccacgacccctcccgtgaaaaggcaattctggaaaatccgcagattttccagaattgcaaattaaaaatcattcttccgctgtttatgcgcaaagcgaacgcggcgcgcattccaaatcatcacgccccatcaaagctgtctccatcagcgggcagggcagcggcttgcgcgtctgcgctgccggtgtctgctgcccgggggactcctttgtacaccagcgtctgctccagcacctcggcacagaccggtgccgaaagactgccgccggcagtggtccagctgtgtggctcatccagacagaccagacacaaaaactgcgggtcatcgatgggtgctacagccacaaagctggcaatgcgcgccttctcgtcggcgctgtccagcttttggctggtgccgcttttgccgcccacccggtagcccgcgatctgcgcgttgcgcccaccgccgtacagcaccaccgcctccatcatctcccgcatggcggcggaggtggcgggctggatcacctgccgcttgcagaccggttggttgtgctgcaaaacgctgccgtccggcgctaggatgtccgataccagatacggctgcatcagacgcccgccgtttaccaccgcacagacggcagcagccatttccagataggaaattttgctgctctgcccgaaggcacaggacgccagctctaccggccccatgcggtcggcggtgtagtacaggctcttttttggctcggcgggcaggtcgatgccggtgggctcccgcagaccgaaagcggcaaaataatcgcagaaagcctgcttgcccagccgcgccccgatctggataaagctctggttgcaggagttttccagtgcctgtgtcacggtctggctgccgtggcgcttgtggttggcgcagtggaaccgcgtgcccgccaccgagatagagtctccgcagtaaaaggtggagtgccgggtaatggctccggcatccagcgccgctgcgcaggtgatgagcttaaacacgctgcccggctcgtataagtcactcactgccttgttgcgccactgggtctgctgcgccagctgcaaggcggcagcgcgctctttaccggaaagggcgtccacggcggcgcgcgcggccttgtcggcgatgacccggggctggttggggtcgtaggccggggtggtggccatggccagcactgccccggtgttcacctccagcacgatgcccacgctgcgggcggctacatggtgctcctgcaccgcataattcaacgcattttcaagataatgttgaatatttgcatcgatggtcagccgcagtccgcagccctccaccggagcaagttcggtttcgtagctttgcgccagcgtgtagccccaagcgttcacggcggtcagcaccactccattctgcccggtaagggtgtcgttgtattcgagttccagcccgctgaccccggcattgtccacgttagtgaaccccagcaccgaggccagcagctctccctgtgggtaccagcgcttggagtcctgattgatgcgcacgccggtaatgccgttctctgcgcagaaatcccgcacggcatcggcagtttcccgctccacccggtagcgcaaaaggcagtcgttggagcgccggtcactgaacttttccagcagcttggcctcgtccagttccagaatctccgcaagccccttggcggcaagggcaagcttatcctccggcatctcccgggggctggcgcgcagggtccagcagctgctgttggcggcaagcagcgcaccgtcggcgctgtatattttgccccggtcagcgggcacaacggtgtcccgcagctgctgccccagcgctcgctgggtgtaccagccgccggtgcataattgcagccagaacagccgcccgatgagccctgcaaagcagacggcgcacaggcccactgcaatgagccgtgcccgcagacggaacgcccgctccggcaaagtgcgcagggcgtctgtgggttttgagccgcacatggcagcaccccctttgcgggcagtttatgcacccgggggcggtgcgtatgactaaccgcccccgcatccgcgtacaataacagaaacggaggtgaccgggattgcacagaactgctgcccgcaaagggctgctgcggccgctgccgcccatggacctgccctttctggtgctggtgctcacactggtagcctttgggctggtgatgctgtgcagcgccagcagcgcggtggcgctgtaccggcggcaggacgcctttgcctatgtgcggccgcagctgctgtatgccgccatggggctgggggccatgtggatggccagccgggtggactaccatatctatcacaagcttgcgtggccgctgttggcgctctcgctggtgctgctgacggcggtgctgttcatgccggaatataacggctgtaagcgctggcttgtgctgccggggcttggcacattacagcccagcgagatcgccaaatttgcggtggtgctggtgtttgctcacatcatcgcgctgaaccacgaccgcatggacagctttgcggtgggggtggtgccctttgcgctggtgctgggggtagtggcggtgctcatgttgctggagccccacctttccggcacggtgttgattttaagcatcggcgcggtgctcatgttcgtgggcggcaccgggctgcggtggttcatgttggcaggggcgggcggcgctgccgccatcggcacggctatcgtgctcatgccggagctggtgccctacgccgccgaccgtctcaactcgtggctcgacccctttgccgacccgctgggcgacggccaccagaccatccagagcctgtatgccatcggctctggcggggcggcggggttggggctgggtaacagccgccagaagcatctgttcgtgcccgagccccagaacgacttcatcttttccatcctctgcgaggaactgggctttctgggcgcgtgtgcggtcattctgctgttcagcgcgctgctgtggcggggcatcacgctggcagcctatgcaccggaccgtttcggggcactgctggtggtgggctttgtggtgcaggtggcgctgcaggcggtgctgaacatcgcggtggtcaccaacaccatcccaaacaccggcatcagtctaccctttttctcctccggcggcaccagcctgatgatgcttctgggcgagatgggcatcgtgctttccgtctcccggggcgaaagctgataaaaggctgcatttcctgccgcaatggggtaggagcggcgcggaaataccgaaaaaaagcggacaaatgaccggacaaatcccgcagagggcgggaaagccgtttccgtgcgttttgttgaccaaagaccctcgttttgcataccatggggtatcttttgcagaacgggggtcttggcatggctggggattggatcattacgggcgggcggcctttgcagggcagggtggaagtgcctgcggccaaaaacagtgtgctgccgctgctggcagcttcgctgctgtgcagcgggccggtgcggctgcaaaatgtgccgcgcctgacggacgtagaggactgtcttgccctgctgcggggcgtgggctgcacggcaggctggcagggcgcagaactggcggtgcagggacagcctatgcgcaccgaccttgcaccggaggccgcaggccggatgcgggcatccatcctgttctgtgcgccgctgctggcgcggcttgggcgggtgagcactgtactgcccgggggctgccgtatcggggcaagacccatcgacctgcatttgcaggggctggcgcagatgggcgtgcggcagctgcccgcagcgcccggacagcttacgctgtacgccccggcggggctgcggggcgcagaaatttgtcttagtttccccagcgtgggcgctaccgagacgctgctgctggccgccgccacggcgcagggacagaccgtgctgcatggcgctgcaaaagagccggagatcgcggatcttgccgccttcctcaacgcctgcggcggctgcgtggagggggcgggcaccgacaccatccgggtgcagggaaggcgctgccttgcgggctgcaccttcatgccggtggcagaccgcatcatcgcctctacgctggcttgcgcggcagcagcggcgggcggcagggtagaactggcgggctgcgcacccgggctgtatgccccgctgctggaaattctggaacaaatgggctgcaccgtagagcgggcacgcgatgctgccgccatttcgcggttcggggcactgcgtggcgcgggaaacgtgcacacagcaccctacccgggccttgccacggacgccgccccgctgctggcggcggtgatgctctacgcacagggggaaagccgcctgcaggacagggtgtttgaaaatcgttttgcctgtgccgagggctttgcggcgctgggtgcgaacgtccgggtggcagagcgcacgttgtatgtgcagccgggcgggacgctgcgcggggcaaagctgactgcaccggacctgcggggcggggcggcgctggcgcttgcggcgctggctgcccggggcagcagccgccttggcggggtggagtttgtccggcgcggatatgcagaccttgaccggcttttggcggggctgggcgcacagatttggcaggaaatacccgcccggagtggggttgtgaaaaaaacacccacgaaaaagcaattttgtcttgcaatcggagcaaaaaaatgatacgatacagttatataaatatcgtatgataatttctgtgcggcatttgcgcagttccacataaaaatccgatggaggacaaagttatggcattgatgctcgatgaagaactggacgaaaacgttacgacgatcaaggtgatcggtgtgggcggcggcggcggcaacgccgtgaaccgcatggtgagcgatggcctgcagggcgtggagttcatcgcaatgaatactgaccagcaggcactggctaagaaccatgcctcggtcaaggtgcagctgggttccaagctgaccaagggtcgcggtgcgggtgcagacccggaaatcggccagcgcgccgctgaagaaagcaaggacgagatcgccaatgccctcaagggctcccagatggtctttatcactgccggtatgggcggcggcaccggcaccggtgcggcacccgttgtggccgaggtggcacacgatctgggcatcctgaccgttggcatcgttaccaagcccttctcctttgagggcaagcgcaagatgggtctggccgagcagggcattgccaacctgctgatgcacgttgacagcctgatcgtcatccccaacgagcgcctgaagatgatcagtcaggaaaagatcaccctgatgaatgccttccaggccgccgataacgtgctgcgtcagggcgttgagtccatctctgccctgatcaacgtgcccgccttcatcaacctggacttcgccgacgtgcgctccatcatgaaggatgccggctacgcccacatgggcgtgggcagcgccaagggtgcaggcaaggccgagaacgccgccaaggctgctatctccagcccgctgctggagaccagcattgccggtgcgcacggcgttatcatcaacatcacttccagcccggacatcggtctggaggatgtggagaccgccgcaggcctcatcacccagagcgcacatcccgatgcaaacatcatctggggtactgcctttgatgagaacctgtccgacgagatgcgcgtgaccgttgtggccaccggctttgacaacaagagcgccagcgacctgcgcaacagcatcaacaacgccatgggcggtgcacagtctgtgccgtctgcggtgttcagcagcgataccggcgcaagcgcagccccggcatccaatgccgccccggctgctgctccggctgaaaagaaggccgtggaagaggaaagcagcgacaatcgttactacgacgagctgctggctattctgaacaagcggaagtaattacaggctacaatggggctggcagctgcgcccatgcggtcagcgaaagccccgtgcaaggtgtgcatgggagggcatcatggtgcagacagagcgggagaccggtgccctgcgcggacaatttgcccggcaggccgctgtacaggcatctgccgcagcacaggcggaaagcgcccgggcacaggcagagcagctgagccgcaagctggctgcggcacgcgccgaggtgcgccggtatcagacccggatgttcgcctttgagcgcaccctgcttgccctcaagcacgataatgcagagctggaagccgcctgtgagcaggcgtgggagcagctggaacaggccaatgcccgggcagaaaaggccgaagccgcctgccgcagagccgaggctgctcttgccgccatgcagcagaccgccccggaaacacctgcgcagccggatacagcccccgaggctgtgccgcagtgcgaggctgcaccggaacagcctgcaccggaaacggaagaaagcctctgcgccccggaacaggcactgcccccggagcctgcacagcctgcatggcagccggagacccggctggaacagatggctgcggagctgatgggctggttcgatgccatgatgccccaagaatgaatcttaaaaggactgctgcgtgttttgcgcagcagtcctttttctttctgcgtgggacgatttgaaatgcgctccgctttgctctgcgcatcatcagcggaaataaggtttatatttcgcggttgccgcgctctgcggagcgcggcaaccgcattttcacaggaagggctgtaacgacaaacggcttgctttcgaacaacgtttgcaaagggtactgtaaaaattggattgcatttatacaaccgggaatgaaaacgtttgcagaaaataccggaaaaggcagaaatgttgcacgcagccttgcattttgctgtaaaatccagtaaagtataaatgaatgtaaaaaaagcggatgccggggaaagcccgctgtatccggtcagtgcaagcagcgtacccggaacaaagccggagcagatggatgcgccgcaaaaggagaaacatggccatgaacgagaaaccgaagatcctgatcgcggatgattccgagatcaaccgtgccctgctcaaggagatactgggcgatggctatgactatctggaggcggaggatggcgcagcggcagtggaactgatgcggcagcgcacggatatctccctgctgctgctggacctgatgatgccgggcatggatggctttgacgtgctgcgggtgatgaagtatcacacatggctggacgagatcccggtcatcgtcatttcggcggcagaggataccgccaacattgagcgtgcctatgatctgggtgtggcagactatatccgccgccccttcgagcggattatgatcctgcgccgggtgaagaatatcctcatgctgtacgccaagcaaaagcggctcacccgccttgttaccgatcaggtgtacgaaaaagagcacaacagcgtgctgatgatcagcatcctgagccatgtggtggagttccgcaacagcgaaagcgggctgcatgtcctgcacatccgcaccctgaccgacctgcttttgcatcagctggtgcaaaagactgatcgttatcagctggacgaaagcgatatcgccctcatcagcaccgcttcggcgctgcatgatatcggcaagatcgtcatcccggaggagatcctgaacaagcccggccgcctgactgccgaggagtttgccattatcaagaaccataccgtggcgggcgcacagatgttgcaggatctgggacaggcgattgcgcgggacgagccgcttttgcaggtggcgcacgccatctgtcgctggcaccacgagcgctgggacggcaatggctaccccgaccggctgaaaggggatgagattcccattgcggcgcaggtggtggcactggcggacgtgtacgacgccctgaccagcgagcgctgctataagcacgcctacgaccacgacaccgcgctgcgcatgatcctgaacggcgagtgcggcgcgttcaacccgctgctgctggactgcctgcgagagtcctcggaacagctgcgcaccgagctgacccgctcggagtgggacaggggcttccggcaggagacccaccgcctttccgaggagattttgcaccgggaggcgctgccccgggagaaccactcccagctgctgctggagcaggaaaaggaacgcacggatttctacgccgcccagtgcggcggcatccggttcgactacgacctgctggctggcagcgtgaccgtgtatgactaccatgccgagcccttgcagcaaaaaacggtaaccgattttgcgcagggcaagggacttggctttttgaacgagcaggatcggcgcaagctttccaaggccatcagccgcgccacgccggaagcgccggacgtggtgctgccggtcatggtgcagcgagatgggaagccgcacctgcaccggatggcgctgcataccatctggagcggtgccggggtgcgccgctgcgtgaacgtgctggggcacctcaccgatgaacagcaccgcgtggagcatcaggcagagctgctgaccgccatcgacccggaggaagatcccgcccggttcctacggcggctgcagggcatctttgatgtggtgcgtctggtagacccggagcaccgcaaggtgcttgcgctggacagtgacggcatcctgaccgaaaagcccggcaattgccacatggtatggaacaaggatacccggtgcgaaaactgcatttccgccaaggcctatgcccgcaagaccatcctgaataagatcgagttcaaggacgaggaagcctattttgtcatttccaagtatatcgaggtaggcggcaggggctgtatgctggaactggtcacccggctgacggatggccgctggctggatatgggcggccaccggctgctgctggaccgctgcaacggcatggagcgcagcgccttcgtagaccccctgaccggagcctacacccgccgctattttgataagttccttgccgggggcgagatgcacggcggtgtggcgatgatcgatgtgaaccagttcaagtcggtcaacgacagctttggacatctggtgggagacgaagcattgcagaccgtggccgcagccatgcagagctgtctgcgtcagactgatatcctgatccgctatggcggcgatgaatttctgctgctgatgccccagaactgccctgacggcgtagaaagcgtcatccgacgagtgcagaacgctgtgcaggcagcgcgggtgcccagccacccggagctccggctttcggtaagcattggcggcgtgtgcaatgtgcagcccttgaccgaggccatccggcaggccgatgcccggatgtattgcaataaagaaaacggtgagccggtgttataaccgcagctgacaacaaaaaaagagacaggcgacctttccgggaagcctgtctcctctttttttcaaagaaatcttttatttccgctgccgggcggcgatctgtgcggcagtgggcgggatatcgccctgcgcggccttttccagctggctcaggcggcggtccagatcggtgagccgctgcgagacgatgtccggcagatcctgctggtccagatcgtcggcggggttcaccgccttgttgttgatacgcactacctcggcgggtacgcccacggcggtgcagttagcgggcaggttgcgcagcaccacgctgcccgcaccgatgcgggcgttatccccgatgaacaccgggcccagcaccttggtgcccgcgccgataagcacgttgttgcccaaggtggggtggcgtttgccggtatccttgccggtaccgcccagcgttaccccgtggtagatggtgcagttatccccgatctcgcaggtctcgccgaacacgatgcccatgccgtggtcgataaacagacacttgccgatggtggcacccgggtggatctcgatgccggtgcggtggcggccatgctggctgacccatcgtgccagaaaaaagtgcttgtgctggtacagccagtgcgcaatgcggtggtacaccagaatgtggaatcccgggtacagcagcattacctccagcacgctgcgtgcggcggggtccttgcgctggatgttccgcgcgtcctcaagtaaacccatgcggaaaacctctctttcccataaacacccgcccacgcggcggggctctcccttttaccgtattataatagcacagcaggagacgaaagtacagtgctgcactagggattgtggaacaaaatggcagttattttgccgcgtgactcgggttttgggtagagtgtccaaaattcggcgagagataccataaaccttttagcacctgtttttgcgcacagccattgacacattttgcggttctatgataaaataatacgaatgaaaacgcaaccatcaagaaaaggagaaacaccatgctgtgcagcgcccagaacccgaaactgaacaagcagttcgcgtccggttttgccgtggcttcgttgtttcctttttttgcgcaatgagcttttccctttgcggggaaaagtttttttttgcccgttttcgggcgcctgacacacaaaaatatcattacaggagggaaccgcgatgctgctgacaaacgctgtgaacaccgagggacggccgctcgagatctatgtaaaggatggcaaaatcgctgccgtagggcaggatctttccgcccttgccgccgagaacgagacggtggtggatgccggtgggctgactgtgctgcccgcatttgtggatctgcactgccactggcgcaccccgggctttgagtacaaggaggacatcgagaccggcagccgcgccgctgccgccggcggctacacctttgtaaacctgatgcccaacaccaagcccgtctgctcctctgccgcacaggccatgatggtggagcagaaagctgccgaggtggggctgtgcgatgcaaaccagaccgtctccatcaccgagaactttgatggcgtgagcatcgaccacctcaagaccctgcccgccagcgtgaagttcattactgaggacggccacggcgtgcaggacaacgccaccatggcacgggcttttgccatctgcacccagaaggacatcacggtcatgagccacgccgaggatatggagatcagcccgtgggattaccgtctggccgaggatatcgagacggtgcgcaactgctggctgagcgagtactaccagacccggctgcacatgtgccatgtgtccacccggggcgcgctggacgccatccgcatggcaaagctgcggggtgcaccggtcacctgtgaggtgacccctcaccacctgtggttcaccaacgacacctgcgactaccgggtcaacccgcccatccgcaccgcagacgacgtggaggcgctggtggagggcatccgtaccggcatcgtggacgccattgccaccgaccatgcacctcactctgaggaagataagctgaagggcatggccggtatggtgggcagcgagaccgccttcggcgtgtgctacaccaagctctgcaagcaggagggtctgccgctggagctgctggtgcacctgatgagcacccgccccgccgagatcctgggtcttgccaagggtcagctggagccgggattcgatgccgattttgtgctggtggatctggacaccccctacacggtggaaaaggaaaagctgcactccaagagccacaacaccccctttgacggcgcacagctctacggcaaggtgtttgccaccatcaaggccggtaaaatcacctatcaggccgaggagtaaaacccatagttacaattcattttctataaatacgacttacaggaggacacccaaatgacgaacatggacaaactgtacgaagctgtggaggctcgcggcccggtgtgcgtggggctggacaccgatttcagctacctgcctgccgattttgtggacagcaccctgaccaagggcgagaacatcgtgcgcttcaacaagaagctcattgatgccaccaaggctgtggccggctgctacaaggtgcagatcgcttactatgagtcgctgggcatggagggcatgaaagcctacgccgacaccctgaaggctgtgcgcgaggccggtgtgccggtgattgcggacatcaagcgcggcgatattgccaagaccgccgagatgtacgccatgggtcactttaccggcgattttgagagcgatttcgtcacgctggcaccctacatgggtctggactccatcagcccctatctgccctacgccgaaaagcagggcaagggcatgttcgtgctctgccgcacctccaacggcggtgccaaggactttgagtacgagaagctggctgatggccgccacgtctacgatctggtgggcgacaagctgaacgcgctgggcaaggactacatgggcgagcacggctactcctccatcggtctggtcatcggcggcacccacatcgaggaggccaccgagatccgcgcaaagtatcaggacagcttcttcctgatccccggctacggcgcacagggcggcaaggccgaggatatcgcccagtacctgaccaagggcaacggcggcgtggtcaactccagccgcggcatcctgctggcttacaaaaagcagccgggcgttgcctttgacgaggccgcttacaacgagtgtgtgaacatgaaggaggccattgctcatgcgtgcagcctgctgtgaagccaccgtcctgcgcaatgaggtcattgccccggacatccgcctgctgaccgtggcgtggccggaccgcgaccacgccccccacgcaggccagttcttcaccctgcgctcctggggcacagacgaagcccccttcctgtcccgtcccatcagcgtgcaccgctggaacccggacagcagcaccatcgagtttttgtatcaggtggtgggcgagggcaccgaaaagctggcgcagctcaagcagcgggataccttccagctcaccggccccatgggcaacggctttgatgtgccggacattgtgagcaagtacaaaaagatcgctgtggtgggcggcggcatcggcactgcgcctatgttccagcttacccgcgagctggccgctgccggggtaaagccggatgtatttttcggcttccgcgacaccccctactgcatggaggagtaccgcagcatcgcaaacctcgtcaaggtgtccaccgacaccggtgcggtgggattccacggctttgtcacccagctgtacgaccccgccgattacgacgtggtgctggtgtgcggtcccaccgtgatgatgaagaacgccgcccgcctgtgtgcggaaaaaggcaccccctgctttgtaagcatggaaaagaagatggcctgcggcattggcgcttgccttggctgcacctgcgagaccaagggcggcgagggcaaaagcgtgtgcaagaacggccctgtatttgacgcaacggaggtgttcttctgatggcagacctgaaaaccaacctgctgggctttgtgatgaacagcccggtcatcggcgcatccggcaccgtgggctacggtgtggagtacgaggaactggccgattttgcaaagatcggcggcatctccggcaagggccttaccctgcacggccagtacggcaacaagggcgagcgcctgtgggagaccccctccggcctcatcaacagcatcggcctgcagaaccccggcgtgcagcactttattgacgtggagctgcccgagatgctggaactgaagcagaagtacggcacggtggccattgcaaaccttggcggccacagcgaggaagagtatgtggaaggcgctgcgatgctgagcgagagcgcagtggacatcgtggagctgaacatctcctgccccaacgtcaaggtgggcggcatggcctacggcgtaaaggccgaagctgccggcgaggtggtgcgcatggtgcgcgctgcctgcaaaaagcccctgatggtcaagctgagcccgcaggccgagagcatccccgagatgtgcaaggctgtggaggccgccggtgcggacgccatcagcctgaccaacaccttccaggcctgcgccattgatctggaaaagcgccgcccggtgttcaacaacatctttgcgggtctgtccggcccggcggtgcgccccattgctctgcgcatggtatggcaggccgtgggtgccgtgaacatcccggtggtgggtctgggcggcattgccaccggccgtgacgcactggaattcatcatggcaggtgccaccgcagtgcaggtgggcgccgcaaactttgcaaacccccgcgcgatggagaccattgccaacgagatggcagcatggatggacaagaacggcgtaaaaacgctggacgagatccgcggctgcgcccgccatgcagaataaaaactgatatatccataaaatatctacaattatgcgcataaaataaaacttagcgcataaatttgcaaataacgcaaaagcgtggtacaataccacccaaaggaatatacaccactgaaaagagagggagaagtacaatgagtgaagcacttgaaattctgaagagctgtgacgcatttctggagggtcacttcctgctgtcctccggccggcactccggcgcatactgccagatggcttatctgcagcagtacccggaccgctgcgccgaggtgatgaaggctgtggccgacaaggtcaaggaactggacgtggacgtcatcgtcggccctgccatgggcggcatcgtgtacgcctacgagctggcccgccagaccggtaaacgcgctatctttaccgagcgcgtggacaacgtgatgtgcctgaagcgctttgccatccacccgggtgaaaagtgcatcatcgccgaggacgtggtgaccaccggcatctcctctctggagaccaagcgtgtcatcgaagaggccggcggcatctgccttggcatcacctgtgtggtggaccgcaccaagcctgaggctccgtctcccatccccattctggccagcgccctgaagctggacctgcccaactataccccggaggagtgccccatctgcaaggagggcaagctgccgctggtgcatctgggcagccgcaagatgaagcaggaagcaaagcagaccctgtaaactgaaagcttttgttgaaacgaggaaaactatgaacgcatatcttcttttggcaaacggcatggtctttgccggacagtccgtgggcgcgcagggcgtgaccgtgggcgaggtggtgttctccaccggcatggtgggctttcaggagaccctgaccgaccccagctattacggccagatcatcacccagacctatcccctcattggcaactacggcatgaaccacgatgacatggagtccgaccgcatctgggccaagggctacatcgtgcgcgaagcctgcaccaccccctccaactggcgctgtgaggagacgctggacagctttttgaaaaagaacaataccatcggcatcgagggcatcgacacccgccacctgacccgcatcatccgggagagcggcgtgatgaacggcgctatcctgaccacctttgaccccgccgatccggccaacaaggccgagaccgaggccctgctggcagagatccgcgcctacgccgtgaccgatgctgtaaagaacgtgacctgcgccgcacccgaggtgttcaacccggaaggcgagacccatatcgtgctgatgcactacggctgcaagcgcaacatcgtgcgctgccttgtcaagcgcggctgcaaggtgaccgtgatgcccgcctttgcaacggcagaggaaatcaaagcccttgctccggacggcatcatgctgtccaacggccccggcgaccccgccgagccggtggaaatcatcgagaacctcaagcacatctttgagctgaacatccccaccttcggcatctgtctgggtcaccagctgtccgcactggcagccggtgccaagaccatgaagctgaagtacggccaccgcggtgccaaccagcctgtgaccgactttgagtccggccgcacctttatcaccagccagaatcacggctacgcggtcgtgggcgaggaactgcccgccgagatgggcgaggtggcacaggtgaacgccaacgacggcacctgcgagggcatcaagtacaaaaagtggaactgctttaccgtgcagttccacccggaagcaaacggcggccccaaggacaccgaattcctgttcgaccgcttcctgaacaacgtcaaagcagcaaaggaggcacgctgaaatgccgaaggaccccagaatcaaaaaagtgctggtcattggctccggccctatcatcattggtcaggctgcggagtttgactactccggtacgcaggcctgccgtgccctgaaagcagagggcatcgagactgttctgctgaactctaaccccgctaccatcatgaccgacccggacgtggccgaccatgtgtatatcgagcccatgacgctggaagtcgtggagcgcattctggacatcgaaaagccggactccgtgctgcccaacctcggcggtcagatgggcttgaacctgtccatggagctggcacgctccggctatctggaccgcaccggcatccgtctgctggcctgcaagcctgagaccatcgaccgtgccgaggaccgcgagctgttcaaggagaccatggagaagctgcaccagcccatcatcccctctgaggtggtggagacgctgcaggacgcactggcctgcgccgaccgcatcggctacccggtcatcgtgcgcccggcctttaccatgggcggcaccggcggcggcatctgcgagacccgcgaaaagctgatcgagatcggcaccaacggcctgcgcctttctcccatccatcagatcttggtggaaaagtgcatcgccggctggaaagaaatcgagtacgaggtgatgcgcgaccacaagggcaacgtgatcaccgtatgtaacatggaaaacctcgaccccgtgggtatccacaccggtgactcggtggtcgtggctccctcccagaccctgaccgaccacgagtaccagatgctgcgtaccgccgcactggatatcatcaccgagctgggcatcgagggcggctgcaactgccagtttgctctgaagccggacagcttcgattatgcggtcatcgaggtcaacccccgtgtgtcccgctcctccgcgctggcctccaaggctaccggctaccccattgccaaggtggctaccaagattgccatcggctacacgctggacgagatcaccaacgacgttaccggcaagacctgtgcctgctttgagcctgcgctggactacatcgtggtcaagtacccgaagtggccctttgataagttcgtctacgccgacaagtctctgggcacccagatgatggctaccggcgaggtgatgagcatcggcaacagcttcgaagccgccatgatgaaggcagtttcctccattgagctgggcatggacaccctgacccacaagccctttgaggagctgaccgacgaggaagtggtggagcacatgcacgttcaggacgccgagcgcgtgttctgcgtgtacgaggcgctgaagcgcggcatcgaccacaaggtcatctacgatatcaccaagatcgactggtggttccttgataagatgcagcatctggcagatctggaaaagggtctggcacagtgcaacggtgtgctgtctgtggagcagtacaagactgccaagaagtacggcttccaggataagaccatccgccgtctggcacaggtggacaccctgcccgtggagaactaccgcgccggcttcaagatggtggatacctgcgctgccgagttctctgccaacaccccctacttctactccacctacgacggcgacaatgaggctgcaagcttcatcgccgagaaggaagccgagaccgcagccaagggcgagcctaaaaagaagaaggttctggtctttggctccggccccatccgcattggtcagggcatcgagttcgactactgctcggtgcactgcgtatggacgctgaaaaagaacggctgcgaagccattctggtcaacaacaaccccgagaccgtctccaccgactttgataccggcgaccgtctgtacttcgacccgctgaacccggagagcgtggacaacatcattgccaccgaaaagccggatgcctgcgtggtgcagttcggcggacagaccgccatcaagctggccaagcacatggacgagatcggcctgcccattctgggcaccccggcggatgccatcgatgaagccgaggaccgcgagcgctttgacgagctgctggagcgctgcaacatcccccgcgccccgggtcgtaccgtgttcaatttggacgaggctctggccgctgccgaggagatcggcctgccggtgctgatgcgtccctcctatgtgctgggcggtcagaatatgatcgtggcctacaacaaggcggatatcatcgagtacatgggcgttatcaccgagcacgtcgatatggatcacccggtgctgctggataagtacatcatgggtaccgagtgcgaggtggacgccatctgcgatggcgaaaacttcctgatccccggcatcatggagcaggtggagcgcaccggtgtgcactccggcgactccatctgtgtctacccggcacagcacctgacgcaggacgagatcgacaccatggtggactataccggccgctttgcccgcgagctgcacgtcaccggtctggtcaatgtgcagtatgccgtttcccatggccgtgtgtacgtcatcgaggtgaacccccgctcctcccgtaccgtgccttacatctccaaggttaccggcgtgcccatggtggatatggccgtgcgctgctgcttgggcgagaagctgacggatatgggctacggcaccggtctgcaccccaacgccccctatgtggcggtaaaggtgcccgtgttcagctttgaaaagctgcacgccgtggatacccagttcggccctgagatgaagtccaccggcgaggtgctgggtattgcgcccaactaccacgacgccctgctcaagggtctgatcggtgcaggctataccttcaagactcccggcccgggcagctgttgcatcttcaccgtgaaggacagcgacaagcccgagttcgtggatattgcatggaagctgaaggatatgggctataagctctacggtacctccggcacctgtgcatggctcaacaagcacatggtcccctgcaacgaggtgcgcaacatctccggcgaggcacccaacatcgtggacctgctgcagagcggtctggtggactatgtgttctccaccagtgccaagggtcgtgacccccggcgcgattccgtccgtctgcgccgcaaggccgtggagctgagcatcccctgcatcaccgcagtggataccgccgcttctctggtggactgcctgcgcagcgagcacagtctggcaaacatcccgctggtggatatcgccactctgtaccgcggcaaataagccctgagacccgcataaaatggttctgtacagcgcctgccgaaacggtgggcgctgtatttgtgcggggtgcacggaactgaatgtggttcgtgcgcaataaattacatttcgtgcgcaatccatcgaaaacagtgcgcgaaatatgttatactcaacaacgcaaaatttgccaaaagacgttacttttggacattccaggaggatatcgatacatgacccgttcccagatgatcgaaaccgtggcacgcaagaccggctttaccgaagctcaggtcgagaccacgatggatgcaatgtttgaccagatcgcggactgcctgcgtgctgacgaaaaggtgaccatcgccggctttggccgctttgagatgcgtccccgcaagccgaaggcttacaccaaccccaagaccaaggtctccagccagctggagtccacctccatccccggcttcaaggccagcggccgcttcaagcagaagctggaggccggcaagaagagcgtggaagagaccgcctgatcctgcacactgagaaccgtacccgtgaccccgggtgcggttctttttgtttctctgctgacaagcgcggcatttcatgctatacttgttgcaacgagaaaaacgccacaaagaacggagttgtccaaatgctttacagcgagttgcagtgcagcgaagccatccacaaggccgtggaacgcatgggctttgccgaaatgaccgaaattcaggaaaagaccatccccctcatgctggccgggcatgatgttattgccaaggcacccaccggcaccggtaagacctgtgccttcggcatcccggtggtggagcatatccagccggaaaataaatatccgcaggccgtcatcatggcacctacccgggagcttgctcagcagatcgccgaggagcttactaacctcacctactttatgcccgaggtgcaggtggcctgcgtgtacggcggtgccaatatggaaaagcaggcaaagcgtctggccgagggttgccagatcgtggtagctaccccggggcggctgatggatcactacaagcaccacagcatcgatatctcccatgtgacccagatcgtgctggacgaagccgacgagatgctgaacatgggcttttataaggatgtgcgccacatcatcgagatgatgaaggcccgcaaggcgctgtccatgttctccgccaccatcagccgcgaggtgatggatatcggctggctgtaccagcacaatgccgaggagatcaccgtgcagccccgggaggaaagccagcccaagatcacccagtatatgctggagacctccggccgtaacaagctgtcggatctggcacagatcgtcattggcgagggttacaagcgggtgatggtgttctgcgataccaagttcaacaccgccacactggcaaaccagctggcacggctgggcttctcggtggactgcctgcacggcgacctctcccagaaggagcgcaaccagatcatgcaggccttccgggacggcaagctggccattctggtggctacggacgttgctgcccgcggcattgacgtttcggatgtggatgccgtcatcaactacgatgtgcccagcgagaacgagcactacacccaccgcatcggccgcaccggccgcgccaaaaaagagggcgtgagctacctgttctatgtgccggaggaaaagaagcgtgtgcaggagctgctgcgcctgactcgcaataccgacctgtgcaccccggtgcacttcgacttcaaccacgagcacatcgtggtggagaaaaagcaggacaacgccgaccgtttccagatcaagtgctatttttaaaggaaggagctgctgtacgaccttgtgcggcggctctttttgcaaaaaggcttgaccttcccctttgtggaaggtgtagaatactcccgtaaggagggggtcgtgacccatgaagatcaacgaagtggaagccgccgtcggcgtgaccaaaaagaacatccgtttttacgaggaagaggggcttatcagccccagccgggagccgggcaacggctaccgcagctactcgcaggcggatgtggagcgcctgcgccgcatcaagctgctgcgtaagctggacgtgccgctggcagagatccgggagatgctggaagggcagcgcacgctggctgagggcatgagccagcagctggaacgtctgcgcagccgccgcgccgacttggaggaagccatcggtttctgcacgctgctgcaacaggaaaacggccctctggaacaactggatgtggagcagacgctggcgcgcctgaccgcacgggaagaacagggagtgacttttgtgaacattgaacggaccgaccaaaagacccgccgcatccggggtgcctgcatcggtgctgccctttttgtgaccatgatggcttttgtaattgccactatgggctgggcaatctacaccgacccgcaggatgccccgccgctgccgctgttggtggtgatgttcggcatcccggcgggctgcatcgtgggcaccctgaaggtgctgctggatcggatcgaagagatcggaaagggagaagaagatgcttattgtaactattaacgagatcccgggcaaaaaactggaagcgctgggcgtggtgcggggcagcacggtgcagagccgcaacctcggccacgacatgatggccggtttccgcacccttgtgggcggcgaggtgaccgactacgccgagatgcttaccgaagctcggcagatcgctaccggacgcatggtcaaggatgccgaaagccttggcgcagatgctgttgtgggaatgcggtacgcctccgccagcgtcatgcagggcgcagcagaggtcattgcttacggaacggcggtgagattcgtatgacagcaaaagaaaaacagggcttcggcctatacttcctgttcgcctttggcatggcatggctgtgtcaggtgggcggctgcatggcgcttttgcagcagaataacgccgtgctgtatcagctggcgcttatcgtaaccatgttctgcccgttgctggcggttctgctggtgcaaaaggcattcctgcgccagcccaccggcatcggctggaaggtgcagggcaagcggcggttctggctggcggcatggttcggcccggcggtgctcactctgctgggtgcggtgctgtattttgccgtgttcccctcccggctggacttttccggcagctggctggtagccgcctacggcggcgagatggacgcccagactctgcgcagtcagctgggggtctccactctcagttatctgctgcaaaacgggctgtttgcggtgctccttgccccggccatcaatatgttccccgcactgggcgaggaggtcggctggcgcggctatatgatgccccgcctgaaggagcggttcggtctgctgaatggccgtctgctgggtggcgttgtgtggggcgtctggcattggccgctgatgctgctggtgggctacgagtatggcaccaactatctgggcgcacccctgctggggctggtggtatggtgcgtggtctgctttgccctcaacactctgctggactggctctacgaaaagaccggctgcatctgggtgccggccattgcacatggagcgttcaatgccattgcagcactgccgcaggtgctggtcaccccggcggatgcttattataatgtactgggtcccatgcccattggcctgatcgccgcgctgccgatgttggcagcagcagtctggctgaccctgcgggagatgaaacaggaagaaaagaactgaatcccaaggcaacagccgctgcactttttgtgcggcggctgtttttgcgcagaaatggtggtagaaagcttaaaacaacccctgaaactgagcgaaaaactggatgatgtatacaaagcgcaaaaaaaggcgaaaaaaatgtaaaaaaggcttgcaaaagtagttgcggtatggtactatatgtgagcgccaagcgctgagacaaaagaatgacttctgaagcctcagcaggaagcccttgaaaagaaccaatagacgctgaaaagttccggctgataccgagaaacctgaagcgctccaagttcgcaaaacttcaaaagcttctcaaaaaagtgcttgacaaaaaaccacttctgtggtaaaataatcaagtcgccagccgagaggctgcggcgcacaggaccttgaaaattgaacaatatcgaaagaacttgtaacggaacctatattcgtgttggaaaaacagtatttccatggatggatgcgtgggcaatcagtatgctctccgattcttctggttcccattgtgaccagagatcatagaaccgcagacactcctccagcccttctgtaagcacgggaccgtggagcgggcagattgttttgatctccagcgcggagatttttttcagcagcgcctgcacctgtgcgccatatttcccgataatattgtaataataccgtcgggcctgcggcacccagggggcacgggcagtgcggaagaatggctttccaatgtggcgcgggtgttggaggggcgcagccccgactatcttgtggtcacacacatggagccggatcattccggcagcctcatgcggctggcacaaaagtacccggagatgaagatcgtgggaaacgcgaaaacatttaccctgatcaagcagttcttcggcacaggtgcattgtcggaagaccgtatgctggaggttggcgaaagagatacgctttccttgggtttgcaccggctgcgctttctgctggcgccgatggtacactggccggaggtgatgacggcgtatgaggaaacggaaaaaatcctgttctcggcggatgccttcggacgctttggctcactggaacggactgcccgtgccccctgggtgccgcaggcccgacggtattattacaatattatcgggaaatatggcgcacaggtgcaggctatcttcggcacaagtaagcttaacttctgtgttcggaatgggaacaggtggaaccttaccgtcatcgacaccgaccgatttgactgaatcagtataacacatttctgtgcttctgtccagtatttttagaaggacgtgccttcaaaactgaataatcactgctgacattttttcgttgacttaaaagtctcaagcgaattgtggtcaagccctcgacctattagtacacgcttgctgaatggataggacgttgttgacgcaggcatttaacttgctgttggggtcatcgggcagagcggaattcatcaaccgctggtcaagaccaattttgcggccatccgacgtgattttcaacatattatccacagaggggtcaacagaaccgctgtggacttcggctgcacgttcgctcaacgcctgcaccatgtcctgttggatttccgaaggcttgaccaccaccgtctcaaattttgcatcaggcactgggagatgaagctgatcgctggtcttgatatccgccgcttctttgaacatcgccatcagttcaggtaagttgaagaacttcgcaaaacgagtgcgtgcacggtatccggtgccttcgggcgcaagttcaatggccgtggtcgtctcaccgaaggtggatgcccacgcatcaaaatgggtcagccctttctgctgtaaggtgttgtactgaagataacgcatcagggtatacatctcggtcatgctgttgctcaggggcgtacctgttgcaaaaatcacgccacgtcctccggtgatctcgtccaaatagcggcacttgccgaacatatcgctggatttttgcgcctcgctcgtactcaaacctgcgacattacgcattttcgtgtacaagtagaatgtgcagcacctctgcggctgcgaagcagtccgcagagtagtctgctttgttgtgataggtaactttttgaagtaatctccaagttttcccccacctcacgccgggcgtgcacctttcagcgcacccggcgtaccatcaaatcgatttactttcttccttcagatttcaacactgctgtgttctcacggacacagagtggttgtaaatttcacagtttaagtttttcgcggtatttcatgattttgcctaccgtctttgcatcaagctcaggcggtattggactgttgtgaaccatgcggtggcatggttcacacagccaaaccagattcggtactttattgattctatcaagtggaagcttgtttttaacgtggtgacaatgcttttgaagcatgggtgagaaggcatttccacagcatttacattttcctttgtccctgctgtaagcatactcccggttcatataatactcaaaattcatccttccctttgcgtatgctgacattgcaatatcgttcggggaattaacggatggacggtcacatggcagtgacttgtgcttagcacgatagttcacataccgtctgcgcccttccactgtatacggtgtcattttctggtcaaatggcttgggttcatagtgactatgcgtgatgaacgcataagttataccaaaccattttccttcgacccataccgcaaatgtcttactgtcgtagcccttgtgtcggtcaggaagattgcaaagcaccttcagcgacacctgcatggagttgtaccgtttggggtacagctttttccatacagccagtgcagcgttgtttactctgcggtctatcgcatggtaggcacgagagcagatggatgtctgcaagtactgtgccatacccataatgacagagttgacgtactgaatttgcgcagcctgcacattgactttttgacaaagttctatgcggtgcacttcttcgagcagtttcttaatcttctttcctaaccgttccatatccggcagcggctttccaaccagatgtttcgtccatgttgccgggtcaggagttttccgttttcgttcggcctttaccacaaagccaagaaagtgtataccgtttgtccgcaggtctgttacataggtcttttcctgcgacaattcaagtttcattctgttccgaaaatattttgtcaagacacgtttcaagcggagtgcttccttctccgttgacgtcagaatcacccaatcatcggcgtagcgataattgtactttggcgttacaccagcccatttcaaacgccttgtgtcgttgcctttatgcttgcactgtctgtgcggttccatatacatacgaccaacataccaatcaaaatcattcagatagacattggataaaagcggtgaaaggattccaccctgcggtgtaccaagctctgttgcatgaaataggtcattttccatatatccagcttttagcatctgactgatgattttcagcacacgcttgtcatggataccgattttccagagcttttggagcagcaggcggtgattgatattgtcgaagcatcccttgatgtcgccctcaattgcccacacgggttggtcaggcgatttgcatccagcatttatgacattgatgataccccggattgcatgtttctgtgcccgataggggcgaaagccgtagctttgcggataaaatctcgcttcacagatcggctcgataatgatacgcacgcactcctgtatgatcctgtccaatacagtggggatacccagcggtcttttctttccgttactcttttcgatatattcacggcgggctggcttgggtcggtagttacgaaaactcgattgaatcaataaaataagctcatctttgggcatttgaaggtatttgtccatttttatcttatccacgccagcagttttgctgcctttgttggacttgatattgtggacggcggttacaatggtcacttcatttaccatcgcttccaccagaccggtgaacgatactccttgaccggacttctcatagagaaaatcctgaatctttttaagttccgtttccgttgaaaatctgacgttcaaatgcacaaggttttcacctcgcagttcgtcacccatctttcagggagttataggattttcgttttgtgaaatttacaaatcgatttgactcgtatccttcgccatggaatatttcaattccgtttgactggcattacccagcccagactactatgatacggctgacttcctgttgctttcactgcactgtaacgctccaacaacaggctctcaaacgttccttaatctctatccctgttctgaaacccttaggctgctaccttacaccgggaaaatctaaccatgctttgaaccacagttgctgcatgattcctgatggggatttcatcccacagggcgtgtgcagaaaaaccagccacacacactttttccaagggtcaccctttcggatgtcgttcgctcttacgatgctgcatagctttcactaacggatagccataggtttcggaagcccgcaccattattatccatgcctctttgcagaggtttaggttttcaggttacgccttcaccacgctctgtacaatgcacacttacaggtggcaacgcacagtggagtattagctctcgtactgtcttgaattttgacctattctcttgaactttgttcctcgacattggttctgtacggcagaggaatttcacccctgattttgagattaaagttctctgtgatattttcttattgctaagtgcaatcacatggtgcttttcgcccttgctgtcaacaaggtcttatgcacaacgtttcgcacggttcttaaacgcttggctctcatccacaaacaacctgtctacgcccaattgttcaaacgtaaccacatcatctttacgggccaattcccgtacaggtgggggcttttgctgcgtgatgcctcagatcatgctgtgcaggcagctccgcataggtggtatggtcgcagcgggagcaggtttcgtaggcatcccagccgatttccgtacaggtgggagcttgcgcttcgtgctgctccagagcatggttcagtgcgggcagctctttgcgggtggtatagtcgcagcgggagcaggtttcgtaagcatcccagccgatttccgtacaggtgggagcttgcgcttcgtgctgctccagagcatggttcagtgcgggcagctccacataggtggtggtatagtcgcagcgggagcaggtttcgtaagcatcccagccaattcccgtacaggtgggggcttttgctgcgtgatgcctcagatcatgctgtgcaggcagctcggtagcggagaaattccaatcgaacccggagatagctggttctccccgaaatagttttaggactagcctcaagttagatatctggaggtaaagcactgaatagcctagcggccgagaggttagcgaagcttatcaaactcagaatgccagaatattgatgcttgggagtcagacagtgtcagataaatgtcattgtcaaaagggaaacagcccagatctacagctaaggtccagctgcttcttttcgttcaggtctgcgatccagcgttgcagcccacgaatcgcactgcggatggactgcatcaggctgttagcggctcgaatatcccggttgagatttccgagaaaagtttctatcccacgtttttccatctggtgtgcggcggggccgagatgcacggtcggtatctgctggacgccctgccgctcaaaggagcgcaggtcaacacgttccggtctgccagcagcctccagatagcggttggtgatggtttcccagctatgccgccaaacctcggcgtacttctggtcgttccagtccacggtgttttccttgtggcacttccagttcccggaggggagttgaatgcgctcaccattttcgtcaaggtcgtaaaccttgcgggctttcgggagccacttgccgtgttcgtccattgcccggagcgtcagcagaatgtgggcgtgtgggttgccatctcccttgtcgtggatggcaaaatcggcaatcatgcctttggaaacaaactgctcctgacaaaactcttttatcatggacagataccgccctttcggcacctccaccggaaacgccagcacgatgcgccgggcaagctgggagttccattggttctctacagcttccacggcgttccaaagcgttgcccggtctgcatatccgggtggcgcatgggacggcagcatgatctcgcacaggaccttgaaaattgaacaatatcgaaagaacttgtaacggaacctattttcgtgttggaaaaacacggtaaacaattccaaacaaaagtaattcacacaggacgcaagcgattgcgtgctgagcgaaacaagatttaacacttttaagtgataaatatcatttatgcgccagcccgattccatcccaaggaaaactgcattttccttgcgctgctttgcagctatccttttgcggctcccgcctaagaccgaagcgcacagcactccgttccaaggcggcgagcacaaccgaatacgattcctgaccgttcatcaagagcaatcttgctgggcggtctttttgtttgggggtgatgcctattccgtgtccgcatttcaaaatcaccatcgtcaagcgcagccaagggcagtccgctgttgccggggccgcttatcaaagcggcgaacggctgttcagcgagtacgaccagaaaacaaaattctacaacaagaagaaagagcttgtccacgccgagatcatgctgccgtcccatgcgccacccggatatgcagaccgggcaacgctttggaacgccgtggaagctgtagagaatccagagtacggccagacacgtgaaacctggtcggaatatggggggaccaccctccaaccctaaatactacccagtgaccgatagcgtatagtactgtgaaggaaaggtgaaaagcaccccgggaggggagtgaaaaagaacctgaaaccctgtgcctacaagcacctagagcacgtcaatgtgtgatagggtactttttgtagaacggtccggcgagcgattgtatgcagcaaggttaaggacttaaggtctggagccgaagcgaaagcgagtttgaaaagggcgttaagttgcatacaatgggcccgaaaccgggtgacctacccatggtcaggttgaagtggaagtaaaattccatggaggaccgaaccgacctccgttgaaaaggcggcggatgaactgtgggtagcggagaaattccaatcgaacccggagatagctggttctccccgaaatagttttaggactagcctcaagttagatagtggccccttaaggggctttgctagtattatgcccttctagggcttactcaagccaccggctcagccggtggttttgacttagcgggtctgcgatttttccttggggtctttttcctcagcgaagaacagctccacatttttctgtgcttttttcaattcctgcatttcatcccgtgccttacggtaggctggatatgctgctttcttctgcgaaagcagtgcggagtattcggcatccagttcttttacctttggcaactttttcaaattcgcttcgtcaaaagcgttttttgctgcccggtgcagcgtgatttgctcccggtgttcttccaaaaacttcttgctgtacccagccttacggtaggcatcatatacaggtcgtgtcctagcgtagttgacgatgtgcgcccgcagaacagcaatctctgccatacgttgctctgcggccttgatggaatcgcccaattcgtgatactgtgcagttgctgcatttactcgctcctgcatttcttcgatgctgccgattttattttcctgtaagaaaatcaaggtcttggacatctctttcaaattgtagcgtttcgcccactgtgcatagccctcgcttttgccctcggagagctttgcctgaatgtccaccaacaggtggaacggctgttcttttggctgctgcctctgatgtgggcggtgttctgcttctccggcgatgaccgccttgatttcatcttcgctgtaccctgcgcccagtgtccgaaagcggataaagcgtttctgccgtgcacctttgaccgaagtgtgctttcctcgcttgatttcatagccctgctgttccaggttttgaagaaaggcttcaaaattcgcaggcttttcgttcagcaggatgccgtcaattacagaacacagcttgtcacgattgctttctttgggtggataaagtgtgcgcttttgccgctcccgatacggcttgatttcaataacagacagctgatgttccagacaaatcaaatcgctcaaccgctgcaccgcaagcccggacaataaaaaatcccggaatttccgggtactgtccagtgcggtggagttgtagaggatgtgattatgaatgtgttcccggtcggtatgggtcgccacaataaaagcatacttgcccttggtaaaccgcatggcaagctcataaccgactttattggcttcctcggcggtgatttctccgggcttgaaagactgccgaatctgataggcaatcacatcatttttctgtctgcgtccggtggcaagttcgtactgccgcttggacagcaggaattcttcgtctacggtcagcgggctacactggtaactgctaaccagctctcccctattcgttttgtcaggattctgtgcataatccgtgcgacttttcaggcaggccgcaaccgacttgcctttgtttttgtgcagcgcaatcagccgtgttgccgccatccatatccccccttttgcaacaaaaaaagccgcccgaaggcggcatcaaaattgtttggataaattttcgtgatcggcagcaccggccagatacattgccttgtaacgggcgcattccagctcgttgcagatctcgtctaaggcaaggtattgcttccatgcttctttgctgatgacgctccgcagggcttcctcagccgctattttggcgtttttcagtcgctgataatcttcgtcctcacccagcatttcagaaaagatcgtgctgctgtgctcagaataacaatcctctatcttctggttttccatagcatccctcacaatccggcaacccagccactaaaacgctctgctgcatctgcaatcaaagtgcccataaaaatcaacacaaagcatccaaactctgccaccagcaagatcaaaaactgcagccactcccggcagtacagcgtataaaggccgcagccgaaaatatacagcatgggcagtgccagcacaaacgccgacaggttcagcgtccatttcagcatcagggcaaggaaagcagtaatcagccaaagcggggaaacgatcatcttaaaaacgaacctcatatccagcacctgcctttctttcccccctattataagggtgtcaaccactgctttgcaaggatgtcaacccgtatgtaccccgcagccctccaactacggggaaaattttagagttcagccagccgggaaaggatctgtctgccgatgctgatgagttcgtccagccgggcgcgcaagtcctccatatcggcggtatagacccgaccattttcattggcggctttggcgtactgattcagattgttgctgcaattctggagcagataagccattcggcgtagctgcggcagatcgagattcaggcagtatccatccaatgccattttgcggatataggcactcaggctgcggatgcccatgctgaacatcttttcatagatgcggttcttttctgttttggtcaggcgcaggatgatgatttcatcccgcttctctttcatcgtgcatcaccatccttgtcgtaataactgcggaagggcttcaccggctccggtttgtccgacttttcctccaatgctgccagcaccgaggggcggcgaggtgcatcctcctgttcctcctcgtcctgttccggctcgtggctcttttcgtccacatccaactgagcgttcagctctgcaaggcgagccgacttttcagccagttcttcttcctgcgggaagggcttttccacctcaatctgcgccgccgcctgctgctgatgcaaggtggctagttcattctcagcagagttaatgcgctccgggaagttgttcagcgaattatccagacggataatgttgcccagcgggtcggtgcccagtgctaccgggtacctccgctgacccttcagaatcgcctgatattcgctgcggaaggtatcgaaccgcagagacaacttaaagccccggtagctgccgctcactttttcttcggcgttgggcagttcggagcaggcaagcaccagacgctcaccggcggtctttttctcatcgtaggtcacgcccttgatggtcatgccgcagaaaccctcttgcacctgcgggtgggcagcggcaagctgtgcgtccgctttcaccccagcaatataggcgttcgtttcctgaatgtcagccgggaatttggtcagcagcttgtcttgcagacggaatttctggctctggtggtcggctttcagaactttgagttttgcgacctgaacatccaaatccatcttctccttgatgagcggatttccggcacacagtgccttgatctccgcataggaaagtgcctgttcgtccacatcttcgcaggaacgcactggagatttagaagtcataatttggctgataaatcgctgtttgttctcaagggtctgccataaataggcatcgaatgtcccttccgtgacgtaattgaataccttgacttccttattcatgttgccctgccggatgattcgcccgttgcgctgggtcatgtcgctgggcttccagccaacgtccaaatgatgcaccgccacaagccgggactgcacgttggtcccggctcccatttttgctgtacttccgagcaaaactcgcacatcgccggagcgcactttggagaacaatgcggcctttttggtttcggtgtcggcgttgtggataaactcgatctcgttttccggcacaccggcagcaatcagctttttgcgaatgtcatcgtagacgttgaaattgccatcgttctttggtgttgagaggtcgcagaacaaaagctgtgtcagcttctgatctttgccctcctcccagatcttcaacacgttctgcacacagacgttcagcttgctgttggggtcatccggcagcatggggttcatcaagcgaacgtccaagccgatttttctgccgtcgtttgtgacgcagagcatattgtccacggaggcatctactgcaccggagtggatttctgccgcacgtttgctcagttcctgcaccatttccttttggatttccgagggtttcgccaccacggtttcaaactttgcttcgggcaccggcagatgaagctggtcgctagttttaatgtccgcaacctccttgaacatggacatcagttccgggaggttaaagaacttggcaaatctcgtcctcgcccgataccctgtaccttccggggcaagctcgatggcggtggtggtctcgccaaaggtggatgcccaacagtcgaagtgggtcagctttttctgttgcagggtactgtattgcaagtaccgcatgaccgtgtacagttcggtcatggaattgctcacgggcgtacccgtggcgaacaccacgccccggcctccggtgacctcatccaagtatctacatttcccgaacatatcgctagatttctgggcttcactggtggataatcctgcgacattccgcatttttgtggtcaaaaagaggttcttgtagaagtgtgactcgtccacaaagagcctgtcaacacccagttgctcaaaggtgattacatcgtctttacgctcatcagagcgcagcttttccagcttggtttccagagttttccgggtcttttccatctgcttgatggagaaattctcgcctgcatggactttcagctcattgatggcggcaagcgtttcataaatctgctcctgaatgatacgctcctgccgctcaaaggacagcggaatgcgctcaaactggctatgcccgatgatgacggcatcgtagtcgccggtggcgatgcgggcgcagaattttttgcggttggcggtctcaaagtccttgcgccgtgccaccaaaagtttggcgttggggtagaggttcaggaactccgaagcccattgctccgtcagatggtttggcactacgaaaaggcttttctggcacaaaccaaggcgttttgcttccatagcggatgctgccatttcgtaggtcttgcctgcaccaacttcgtgtgcaagcaacgtattaccgccataaagtacatgggcaatggcattgcgctggtgttcccggagggtgatctccgggttcatgcccacgaatttgatgtggcttccatcgtattcacggggacgagtagagttgaacagctcgttgtactgcttcaccagcgcaatgcgccgctgggggtcctgccagacccagttggcgaaagcatccttgatgacctgttgcttttgctgcgccagcatggtctctcgcttgttcagcacacgttttggcttgccctcggcatcctcgatggtgtcgtagatgcggacatctttcaggttcagagtttcttccagaatcttgtaggcgttggctctgctggtgccgtaggtctcggaggagataatatcgccccgcccggtggcagttttgccctccacacgccattctgcagtatagggagaatatctcaccttgactgcatggcgcagatagtaggggatctggaacgtctcggtcataaacttctggataatgtccgggtccagccaagtagcacccagccgtacatcaatttcagatgcttccagttctctgggctgcgccttggtcagtgcatccacattgacggcaaattccgggttggtctctgccgcaaactgcgccatccgcagctttgcccggacatcgccggacaggtactcgtctgccatctgccagcccgcttccgggtcggtggggtctgcggcagggtccttgaagatcacaccggaaagttcggtggtaatgcgtccgtagtcgccgggagtgcccagcagttctgccatatagggcaagtccactttaccgtgttccccgatggacaccgccagtgcttcgctgggggtgtccacactggtgacggtgcgctccgggcgaatggtgcgtttcgtaaacatcgccgccttgctcttgagctgcccctgctcgtccagattttccagcgaacagagcagataataggaggaatcctgctcaaacagccgcccgtttctacggtcattcagcaagccatatttggcggtaaaggcgtcgtaggcggtgttcaaatgctcctgtgttgccttgatgtcctcgtccgggaagtcgttcaactgttggtcgatcaggtcgttgacgatctgccgcagctccaccataccggtgacacgccccttggcggtgtcggacagctccacctgcgtcatcacagaattttcccggtagaaaacctcgccgtccaccacggtgtaggagaagttttttacatccgggtcggcaggcagggtgcgccgggtggcttcttcttcggcaatgtcgggagcgtctacctcggcggcagtatactgcccttcgatgtgctgcaccgcttcggcaagctggtcggcaaggtttgcaccctcaaggggcgcaaccgtcaagtcctctcgtccgtactgggtgctttcggtggtcaattcacccagaaccatctccgggtggtccacaaaatactggttgatggcaaagccgtcctcggtcttgccaagctgtacccatgcaggctcaatgtccgcagggcggtcacgcttttgcaaaaagataatgtcgctgacaacatccgtaccagcgttagcacggaatgcattattcggcagacggatagcccccaacaggtcagcacgctctgccatgtgcttgcgggcggtgctgtccttgctgtccatggtgtagcgagaagtcacaaacgccacgatgccgcccggccgcacttggtcgatggctttcgcaaagaaataattgtggatcgaaaatcccagcttgttgtacgccttatcgttgaccctgtattgaccaaagggcacgttacccaccgccaaatcgtagaaatcacggcggtcagtggtctcgaaaccagccacggtaatgtcagcctgcgggtacagttttttcgcaatgcgcccggtgatgctgtccagttctacgccgtacagccgactgtctgccatgctgtccggcagcattccgaagaagttgcccacgcccatactaggttccagaatgttactgctgtggaaacccatgcgctccaccgcatcgtagatgctgcggattacggtggggctggtgtagtgggcgttcagagtagaagcgcgagcggcggcgtattcatcctcagagagcagttctttcagctgggtgtactcggcagaccaattttccttgttggggtcaaaagcgtctgccagaccaccccagcccacatattgcgaaagcacctgttgctcctcggcggtggcaccccggtgctcctcctccagcttgaacagtgtacggatggcttcgatgttccgggcgaatttctgtttggggcctccgacacccaaatcatcatccgtgatgtggaagttcccagcaggctccggcgcaggttcggtattcaaggcttcatccaaggcagcggcatccgggaagttctgcacctttctgtccatcacggcagagatgggcagcgcatccagtttcccgtcagagagtttcggctcgtcctgttcctgctcgtacaactcccggacaacagccagcggcgcttcccggaaaattggcatccgcatttctgccagtgctacatcctgcaaggtcacgctgtccttatcaaagttgacgttatccacccggaaggcccgcccttccatgtggacgatggctcccagcggcagataatcttcccggcgcaaatatttggtctggtggtgggtgccgtcctcgttcaacccggcaaggtagacgttctcgccacactgccacagttgcttggcacggtgcgcccactggtcactgggaaagccggtgaccgggacggtgcccaattccgtttccttttccagcagctttccacctacaagttcgcagaccttccgggcatcctcgccgtaaaattcaaactgtccgccctgttcaaagcccaccagcgcatccgggtgctgttccttcagggcgttgtactcggcgacggcatccagcggcagcagtgccgggcgttcctccgccttactgtggtagtgctccagttcctcgtccgtgacactgaccagttcagaaaaatccaatgcctctagttcggtctcggtcagttcttccagactttcgtactgccgctcgtcgatcagcacttcacccagataccgttccacccggtatcccaccaaatccacattaacttgaatgggaatctcctcatctgtggcgttggtgtaggcaatgtcgatcttggacaggtcggaaaagtctggctcagaatcatattcttcctgacaaaattcccgaatcaggtttttggcatgggtaagggtggcatccggctttgcgctgacgggcacaggcggcgtgtaatgctccttttccttgtcggtcaggtagcggtcggactggatcatcaggtcgatatacttttctacctgtgcccatttcagggtgattttctggtggtcggggtaatggtcaaattccagccccttccagtcgtggttcacaaaacccctgctgccgtccagaaaatcatgggagtgcccaccgatgccgtactcttttgccagtgccttggtacggagattgcggtctggctgggtctggtacagtgccataatgcgctgcttaccgcccataaatcctgaaccgtgcttgcgcagttcgttctcaatttccgcttgagataacgaaaaagcggagggcgttttttcgctctccgcttggtcgatggtttcgatttgctggacttcggtgggaatgtgggcatcaaagaaacttagctgtagatcagttccgtcagcaccagttcctcggcctgtgctttcaggctgttcatgtgctgcacccatgccatctgattccgctccttgtccggggcgggattctgcttcagaagctgcgccatggtctgctgcatctggttctcggccgtctgctccacctccatcaggtgcgggtacaggctcccgttcaggagcatcgtgttgtacagcaccgggcgatggttcatcagatacgtccggcgcagcctgccgtacttgcccagcggcttccggggctggttcagggtcaggttcgggagctggtagtccccgacggtcgagtaggtcacgttcctgctgttcgtattcatgttggctcctttctgcattgcggcggcgaatggttgtttttacggtacgctcgatgttccgcagcacctcccggctcatgtcgctgacggctgcgccgagggcaaagacggcatccggggtggagaagttgtagatcgcctgaaaatcgtccttgtcgaaccacccggcaggctcaaacccacagcgttccagcagcgtgtaggtgacgctgatggcggcggcgcttttgaactgcatctccaccccggcatcatcataatccatcagcagcgaaccgtcaacgatggcacgaatgtctccgccgttgttgtcccagtaatctgccaccagtttcccggcaacatcggcaagctgctggctgacacgctctccgctgataccgtaggtcttgttcaacatttccgaaactggctgtttcaggtcatcattgtactgccacacctccgggtcacgggaattgcggcgcacccccgtgtccgacacatcgaaaacgtaatgcagccgggggaatccgctggattcgtccagcagggcgatacccttggcaccccggcgcacatagcggttcatccggttgttccagatgtcgaagtcggcgcaggcggtggcatccggtcgctgggcgtagatcataagctggtctgcaaagaggtacttatacagccgggatgcggtggtcaggtatgctgtccagctttcccagtaccgggtcatcccgttcgctgtgcgctgggcaagggcgagatattcttcagttttgcttggcatagcgttcctcctttttcggattttagggtgaaaaaatagcggacagctatgggcgctgtccgcagggggatactgtaagcgatttgtagtttggcaaactggaatttcttgccgttttacttccaatgctttagtgtaggaactagagattccatatgtgctctgacttgctcagcagaccaattctcatttgccatatgttctacacaaaaatcaataagctgttctttgcttccgtatgtgaattgaccatcactgtaacaccatttacagtaatcttcattgaattcgccatcgggttctttgctaagtgtttcatcgtcaagaggcattccgcagcattggcaaataagctgtctcggagttcctaacaatgtattgatagacacatcgaacaattttgaaagctgttttaaggtttctgtatttggaatcgtttcaccagtttcccaacgagaaactgcctgacgagtaacaaataccttttcagccagttcttcctgagagagattatttttatttctcagacttagtatcacatcttttgtttccatttatatcaccaccttgacataattataatgatttgcaccggcaaacacaagcaaccggctgttgccttaaatctgcgaaaattttatttcagctttcaaactatagtgcaatctttttcatcggtggcttcatcaagcccctcgttttggatttcaaagccttatggaatgatccactttcttcatacatatggacaccatcataacttccgaatgcaaaccacccatctgcgcgaaagagcctatgtacgccgcccacaggcggcaataatcagtccgggggaaattccagctcggtaaactccgcatcggtcagcagcttcagcttttcgataactccctctgacagctcccgcagggcggtttcatccggcatcaggtagcactgcatgagccgcagttcgtggataagccccagccgggtgccggtgttgtagagcatcatcagcatcagctcttcgtggttaaagttcatgggcatccctcgctttccggcatccagttgggttgcactccggggcatcgcatttttcttttgcaccagccagatctgccagcttttccagcgtggaagggcggttagacagtcccagttcttcgacttcggcaaccttatccatgactgcatcatagtcctgcaacagccgccgccccttttccatgtggtgcgcttccagaatctgctcccggacttcctgaatcgtcaattcgggtgcgtcaatctgtccgccatctatcacagaataatcgctgtgataaagggtataatcccagccatccccgcaggactggacagcaagatagcccttgccacccagctcccatgcgccctgctcgtcctgtgtctggatttcaggataggcggtcgagccggtgcgctccatcatctcgccgaactgacagatgtgatagacgtttccgtactcgcccagatcaaaatgatagtcgtccagatgctcgacccgtgccgtgtaactgctgccatcggagcggtcaacctgaatcacaccatgattcggcacacggtagagatcatcatagtagctgttgataagccggacatcatctctgggaatcgtggggtcatcccagatgcgccgcctgcggacaccagactgtggaatggtatcaaggtgctgcaagctgacctcctgaatcgccttgcggtcatcactggaaagctcaaacagataccagttccgggcggcaggaatcgcatttcttccgtcagaaggaagattctgcttggagatctgcccgaactcctgtggctcaccggtggcacaatcgtaggtggcaaaaccgacaccggcaccgttttcacgcaaatgcaaaaacctgtccccattgatgagatagagggcttccgttttctgctccatcagcatccaccctcaaattccagagaaaacttgctgcggccatcggcttcggtgcccagcagtacggtggcgttgtaggtcttgcccttggcactcttgcagtccttcagccggacacgtccatcccgcagcagtttgtccgccacatgggaatccagccgtttgcccagacgcttgaagaacgcattgtccttccacagcacgaaacggcactcccggttctcgcagaaccagcccttttcacgctccacaacaggcttcccacagttcgggcagacaccaatgattttgtttttcataagcgcattcgctcctttcgcagcctcggtggtcgttaccagcgaggaaatcatctctttgatttcagtcataaaagtttccggctccatttcgctgcgttcgatttgcagcagcttcgtttcccaatcggcggtcatttccggggactggatctcttcgggcatcacagtaatcaacgccttgcccttgtcggtgggcagcagcaccttggttttcttggtgcccttgcgctccagaaagcccttctgcaccagtttttcaatggtggcggctctggttgccggggtgccaatgccctgacgttccacgccctccggcatactgtctgcactggcggtttccatagcgtgcagcagagtgtcctcggtaaaatgcttcggcggcgaggtctgcccctctttcagttcggcattgaggatgccgcactcgttttctgccgcattgggcagggcggtgagttcctgttttcggttcaggatgtcggccagcaccttgcgctccactgctttccagccttcttccaaaacctccttgcccttggcagtaaatttctccccggcacattcggtggtgagcagggtttccagataccggaagggcttgctcaccgccatcagcgtccgggcgatgatgagcttcaggacgttctgctcgcctttgggcagcgcttccagatcggcttgtagcatactgcgggtgggcaggatggcgtggtggtcggtgactttttcccgattgacagtacgccgtgtccagggcaccgcctcgtccacgtcctccggggtaattccgagaaaaacttccagttcctcggtcagttcctccagcatttcctcgtcatcgtcggtgatatagcagctatcagttcggggataagtggtaagtttcttctcatacaggttctgcacatagtccagcgtctgttgtgcgttgtaccccagcaggcggttggcatcccgctgaagggtggtcaggtcgtacagcggcggcggattctcagacttttccttgcgggtgatgcgctggatcgttgccaccatctcccttcgacaggcttccagcaggttttctgcaacggatttttcaggaatgcgacggctggatgccgtgcagccgctggtcagttccagatccaccgtgtagaatttctccggcacaaaggcagcgatggcggcttcccgcaccaccgtcatggcaagcaccggagtcataacacgtcccaccgccagcggctgaccgtacaggcacgaaaaaagccgggacgcattgatgccaaccatccagtcggcgcgttcccggcagagtgctgcgttgtacagcgcatcgtattcagttgacggtttgaggtgggcaaannnnnnnnnnctcccggatggcgttttcctccatgctggacagccacaggcgggagaagggctttttgcagcccgcttgctggtagacaaggcggaagatcagttctccctcacgcccagcgtccgttgcgcagacaatactatccacatccggtcggtgcatcagcttttgcaggatgccaaactgctttttggtggacgcagacaccagatactgccacttttgcggcaggataggcaggtctgcgatgctccacttgacgtatttggcatcgtagacattgggcggtgccagctccaccagatgaccaacacaccagctgacaagatagccgttcccttcaaggtagccgtcctgtcggttggtggcaccgaggactttggcgtaggacatggctacggacggtttttcgctgactacaagttgataagacaataagcattcctcctaaaactcaaaatctatgtagccacaacaaatgccagttgacttttggaaagtttaagcatatactatgtacagtgatcgtgctgtggatacttgtgaggcccacagcctagaaggaggttcctagcaataggagcctcctttctttatagaacgctttgtgaggacggaaaaatgccgaagccgtttttgacgtatgagcagcagcttatcaagctgcgcgatgaaaaacacattgtaattacagatgaaaccgaaactctttgcaaactgcaacaggtcggctattattcgcttgtcagtgggtacaagcatctttttcgtattcctgcgcaaaagatttacaagaatggaacggcttttgaagaacttgtgtccttgtatgagtttgacgaagctctgcgagaactatttcttcattatcttctgcacattgagcgacatatccgttctttgctttcctattattttacggagaagtacggagaagcccaaagcgcatatcttctgaaaacgaactataactatgtgcggaaacaccaacaaggcattgaccgattggtgtatgaactgcaaaagctgactctgacaacgcagcactcctacatagcctatcaacgaaatacctatcacaatgttccgctttgggttttggtgaatgctctgacgtttggcacgctctccaagatgtattttttctttccattcgacttgcagagcaaggtaagcaaaaatttcgctcatgtaaatgaaaaacagttgggtcagtttcttacagttatgaccaagttcagaaatgtttgtgcgcataatgaacggcttttttcgtatcgctccaaggatgcgattcctgatatggaacttcattctaaactcggcatttccaaagaatgcagtctgtatcaatgtggtaaaagtgacttgttcgctgttgtgattgctttccgataccttttgccaaagcaggaatttctggaattcaagcgtgcattgacgatacaaatcgacagttttctgaaatccaccacgcatatttcagaagaagaactgctccgtgcaatgggcttccctgcaaattggaagaaaatcagcctttatcgaatttaattatgtacggcggcaaacgccgccttgaaatcagatgggttcggtgtcctgctcgtccggggcttcgtcctcgtccggcacatccgtcggaatctcgaaattgccgttgtcctcggtgtagtccgcatcagggtcagcagcttctttttctgcctgtttcttgtgcttctgctggatgaagaaataaaagccgccgcccgccactagcgcaatcagagccacgacaccgagaaacgccgcagcatactttgtgactttattttctttcggctgttctgcatcggatgcagcagcttcttctgcggctttcttggcttcttcctcggctttcagcttgtccagttccgcctgcttcgccgcttctttttcggcgttgtaggcttctgctgcttcttcctccatcaaggccagcaaatccgcttcgtccacaaggttcataaagtggacggtctgctgccccttggcattgcggtcaatgaccaagtagaatgtcgcacccgacttgctcaccatcgtaatgaactgctggccgctgccatcggagtagttggtgtgataatcgtccaccagtgtcagattgccctccggggtcagtgcgcccgtttcctcatccgtaatggtgacagcatcttcttcctctacgatttccggcaggacaggttcttccaccggggtggtatcgccctcataggcgaaagcaggagcagccatgccgatgcacagcaccgccgataccagcagtgcgccgaatttcttaatcttcatcattgacatcttcctccttgtcaaaagttgcacccacagcggccagcgcagccgggttcggggtggtgttggccgactgccgcagcagggcggcaagctgttccgggctgacctttgcactgcgcaccatttcgttcacctcggcggcctcggcttcctgaatccgccgctccagaatctcaatgcggttgttcagcttgatgcgccgctctttctctttttcgagcatcgcccgcagtttttccagtttctcgctcataatagaaccctccaatcattttgaaagccgtccgaatccggcaagatactgttgccagtaggacgagtggatgtcagcatatttgatggggtctccggcactgaccatcatgccattaccgagatagattccgcaatggctcatccccggcgtatcatacgttcctttgaagaaaaccaagtcaccgggctttgcttcggcttcagaaatatgctggctcttctgccacaatccgttggcagtagtgcgcccaacatcatagccgttctggttgtagacccagcaaacgtagccggaacagtcaaagccagtttcgggggaactaccgccccaaacgtagggagtgccaacgtatttcttggcttcctcatagatggctgcaaattcactgtcagtcagggcctccgcaggaacctgatagtcgatgccgggtgcgccggagccatccgagccaccgggcggcagaccgccgttgaacagataaggccgaccacccaaggtgtcctgaaagatctcgtaccgtttccattggtcgttgtccagttcctcccggataactacttccaagccacggttcaccagcttggtgtggaagatgcggtactcgtagggcacctgcgtgggaaccgggattcctgccgggctgatgacccagacggtcttataccgtatctgcacctctacccatgtggtcagcttatactgctttttgaaggtctccttcaacttgccctgcacctccgaccgggtgtaatcgtcatacaaggtggtcaggaacgaagtcagctgccatgggtcatgctcgatggggtcgaggtggtactggtactcgttgtagccgggatggtcggtgggggtgcgcttgatctttttatccagttccttttccagcttcttgtagtcggtttcggctccccggatgtcccggtcctctgcggtgtaaatggtctgaccggatacctgcgtggtgccggaaaacagaatggaacaggacgaaaatgccgacatgaccagcagcaagagcaaaagaaaaacgcccacgatcaccagaacgtgtgcgttgcttttggcggcattcgccagccctttcacggcagtgctgacggcagttttgcccttttctaccgcctgttccatgctggaccgggcggcagatgcaccgttggatgccgctttgccgcctgcggtctgcgccgccgtgcccgaacgggcagcggcatagtagcttttgtggatttcttgccgctgtttccagcgtgaaagccagttggagccgccctcgccggtgccggatgcgcctgcatcttgtggcgcagtcggctctcgtgcagaagattttgcggttttggtgcctttcttgccctgcatcttggctttcttcttgagcttccgggcatagcggcttttggaaatatcacggacatttcctgccgctttttcgccctcgctcaacgcctgcacaccgacgttttcatcctcgtactggtcaacctcccgatgcaccgcagaccgggcggcatgggcggcgtacatttctcgcttctgcgctttgctcaaccggctcaactcgtccggggtcagttccgccttgccaaaccgtagatgctgtgccttttccgcagctttatccgcatcggttttcagctttttctttttgggcaccgactgctccactttggcttttttcgggggcgaacgggtctttttggcagacgtttcctctttgatgttcagtttcggcttgctcatttctgcccctccgaaacctcacccaacttggtggtcataatgcggtagagttccagatcggtggggaaacggtctacaaagggcaggatcacattgccgaaaaaaagcagcccctcgccctcgccggagtgggtcacataggaaagctggtgaggagagatgttgagctgctttgcgagaatctgccgatctcctgccgcctgattcagcatgatgatcatgtcactgttctcgaaaatattctcgacttcacgggaagaaagaaggtctttcacgttctgggtcagccccgtgggaataccaccccacttgcggaaacgcttccagatctccacggaatacgccgcagtctgctcctctttcagaagcaggtgcatctcgtccatataataccgtgtggactttccgctgctgcggtttgccgtaacacgcccccacacctgatcctgcacaatgagcataccgagtttcttcatctgcttgcccagttccttgatgtcatagcagacgatgcggttgttgacgttcacattggtgcggtggttgaacagattcagggagcctttcacatagatttccagagccgtggcaacatggtgggcttctttttcgtcctgttggagcagggcgttgtacaaatcctcaaggatgggcatattctccgggcaggggtccgcaaaatatttgcgataaatgagatgcacacagcggtcaatgacggttttctccaccggcagcagaccctccttgccacccaccacaagttcgcacagggaaaggataaagtcagctttcagggaaagcggattatcctcctcggagtagttggcgttgatgtccatggggttgatgaactgggtactgttggggctgattttgatgacctgccccttcagccgattcaccagcggagaatactctccctcaggatcattgacaataatatcatcatccgtcaccagaaaagcgtttgcaatctcacgctttgccgagaaacttttgccgcttcccggagtgcccaaaatcaagccattggggttcttcagcttcttccggtccaccatgatcaagttgttggacagggcattcagcccatagtacaggctttctttaccggactggtacagttcctgtgtggtgaacggaatgaagatggctgtactgctggtggtcaggccgcgctgaatttcgatctggcagtcagccagcggcaggctgctcatcaagccctgctcctgctgaaagtcaagccggcacaggttgcagttgtgtttctgagcgatggagctggcctgaaagacgttgttttccagttcctgctccgtgcgcccggtgttcagcaccagaaaggtgacaaggaacatccgctcgttctggctctgcaattctttcagcagggcttttgcatctctgccgtaggttgccaaatccgacggaatgatgtcgatatcatacccggcgcggattgcctttttctgctcctcgatctttgatctatcgagttcggtgatggtgtgcttgatggttttgatggccttgttctggtcaacggactggatgtgcatggtaacgatctgggacgaatccatgtccagaaaatccttcaaaagctggtcgctgatgtcggatgccgtgatgctcaagaaactggcggcgcaaaaaatgccgcccatctggaacgtccgggagtttttgaaggcaaaggcggtgggtgcaatggcatccttcaccgaaaggccgctttttacaaggtccttccagtcaaaatgaaacttggatgcgccgtccatgtcgaacatatcgtgcatgagtttcagccgctgggcaccgttcaggggctttgcctgcacccccagccggtggaagttgttgagcaaatcgttctggatgtggtccagacggggcttgacctgcgccatgctctcgccctccacaccaaaggtgatgaatttggtcttagtcagaccattattgcccttggcaagctgctggcgcagcatctggctgtactcagcacgaacatcatcgaaaccatctcgctggtacgggatacggatgcttttctcaaactcggtgctgtcggttgccatgttcacgaaggacagctcaaatttgatggagctatcaaagaagttcagaaaactgcaccattcctcgaaaatggcggtcctgtcctcctgctgggcgagctgataattgatgtcctgatactggatggtgcgggtgtagtagttgggcttcacccggcaggtgccatcctcgaacattcgctgcatggggatggactgctgggctgtccggggcacagcaggctttgcgttctgcctgcgcttctgcgcagactgcggcttactgtgcttaccgttctttttccaaaacggaatcatgggtcatgcctcccttcatcaaaatcgcatagtagttgttggtcttgtaggggcgaatcttcgggcggagaaaccgggactgcacatagtacgacagcagcttttccatgggctgaccgtttttttcgtacattccaagaaagaacgccggcagcatcaccgccatcatgccgagggttgcggcagtgttgccgccggcgtcccggagtacaaaaaacagcggcactccaatgagagccgctgtgccaaagcagacgagctgccgcttggtcagattgaatgcgaccttcgatttcactttcgtcaggtcacggggtacagagatatacgcagccaagtgaacacctcctttagtgcgctccgagaacggatttcgtcacagagctggtcttgaacaggctgaaacagagcagaacggtgtagccgacaatgctccaaatggagttgatggcatccccggaaatcgccacgctctggatcagcacggcataaattgccacgcagatgaggatgagaaagccctgaaatcctagcgcgaacaggcatttcaggtagttctgccccatgtgcgattgctcgtggttgccgaaggtcgccatcgggatgggtgcaaggctcaccatgcaatagatctcaatcattcttccgtacacgatgacaaaaataatgatgctcaagatccgcatagtgatgccgatgaagaagctttgcaggaaaagcccgaataggggtcctacatccatctgcatcaggctggcttccaacatcgacaagccaatgtcgttgacacgggtgtttccggcaatgatgccgctggaatcggacaccaccttctgggtgacgtcgaacaccgccatcacaatatcgaaggtgttactgatgagccataccgaaacagcggtcttaaaaatccagcgcatgatgagggcaggctcaaactgcgccatattgttatgctgagtgatcatctcgatcaattcataacaggcgatgaaggtcaggatgatgcctgcaatgggcagcactacgttccgggagagggcttcgatcattgcaaaaacgcgcggctcaaagctggagggcttggtgcccacctgctgggcgatgttgccgacttgggtgttcacatcatcaaacagtccgctgagattggacataatgcctgccgtcaggatgcctttgatccagtcggcaatggctttgagaacggtttccattcagcagtcaccgtcctcagctgaagtggttgatgagggtcttgagaaggttcaggagaaaaataatgtgggtcaaaaactgcataatagcaccgcctttcattgatgggtggagattcgtaccgcaatgcgctccttactaaagggctgttatccacagcagagatggagcgattgcgtatgtacaggcggaataaatccgcctgcggctcttagccgaacagaccagacagcagaggaatgagggtgatgcccaccagagcaacgccgccgccagccatgagctgcttcatgccctgagacttggagccggggttatcgttgccataaccttccagcaggttgatggcaccccaaacgccgaggccagcacccagagcgacaaccagagtctgaagaacttcgatagcagagttaaagaattccatagtcgtttctcctttataattgaaaacttgtagaccgtccgtacacacctgaagccataatagttgagccgcaagctgcggtgggagttgacttgctggtgtacctctctggccgggtaaaaataaagccgcctaccgaatcaggcagacgggagcgaatcagcgtccaccacgatgaactcatcaccggggtggatcttttcttttcggttcaggtatttttcaatatcaaaggcgtttttggggttgtagtcggaggtcagcttgtagttggggtgctgggtcaggtcgtacttgtcagaaagaaatggtctgacaccacgcaactgcaaaatgcacttgccgccgtccagtaccgccagctcgtcccggctcaataattcgtgccccatcttctggaaggtggttccgtagctggggctgttgccacgggtgtccgaggtgttgaatgcgtcgatggtctccttgcccagcatctccgacaggtctttcagggtggtaggctcgctgccgcccagaaatatctggctgtccatgttgcccacgatagtgtccgcattgtccttgtagatggctttcaactggcttctcgcctgcaaaacaaggcaggcggagatctcacggctgcggatagtcgccaccagcttttccagattgggaatctgcccgatgttggcgcactcgtcgatcaggcaccgcacatggatgggcagtttgccgccgtacacatcatctgccttgtcgcacaggaggttgaaaagctgggtgtagaccatgctgatgaggaagttgaaggtgctgtccgtgtccgacataatgaggaacaatgccgttttcttatcgcccagcgtgtccagttgcagctcatcgtacatcgttaaatcacgcaattcttggatgtcgaagggagccagccgtgcgccgcaggaaatcaggatggattttgcggtctttccggcagctagcttgtaaagcttgtactgccgcccggcaaagctgttgggtttcttttttgccagttcttcaaacagcagatccaccggattctggtattcttcgtcgtcctccagcacctgcatggtattcagcatttccaacagagtagcgaagttttgctcctccaccggggcttcgtaatgcagataggcaatcagggcggtcaaaagcagtctttcggatttttcccagaacgggtctccaccggacccttcgcccttggtgttggtcatcagggtcgtgaccagtttcagaatgtccttttcgctgtggacataggcgaaggggttatagtgcatactcttggaaaagttaatggtattcaggatcttgaccttatagccattcttcaacattgcattgccacattcaagcacgatagttcctttcggatcggtgacgacataggagctgtggcactgaagcagatttggcttcagccaaaagcgtgttttacctgaaccggagccgcccaccaccagcacatttttgttccgggcgttcttggggtcaggcgggcggttggacatcatcagccgttccgttttggtcaggatgatgttgtcggcaaacttgggagccataaacggttcaatgtccttgggcgtaccccaccgggcagagccgtactccatgccgtgacggtacttcttggcgtttttgccacgcagatagaccgccagccgcaaccctgcgccgcagcacagacccaccagcaaatcaagcggatgcagactgggcagagggttcgcaaacgccaccgggatggtgcccatcatggacatgatcttatcacccagctctttgccctcggcaagccgccacgcttcgccaaagttggttgccaccagtcccagcaaaatatagggcaggtacagcgccagcagctttgtcagctttttcgtggtcacagtccacgctcctgttccttgtgccggactttgccggggagttctgccgccgcctgcaccagctcctgcaatcgtgccagcaccgaggggcgcttgtccttgttcagcaacgaagccgagtattccttgaacgccgattggaaggcttctgcatccggggctttgaaaaagaccagataccggggcggcacctcggaggtgtccttgcggatggcgtagtcgatgccgtactttttggcatagcgttccagcccacggatgccggtcttgctgatctccacgctggaaacgccccggttttgccgcagaagggtgcggacgctctgcttgccttgggatgccttggactggtacaaacgaaacgccgcctttaccgcctgcaggacagtccgggcagacagctttgtggtggagatcatcaggttgaaggatttttgttcgatttcttcctgcactgccatcacctcgtataataaaatagtagtatttatagaccgctctccagcggaatgctacaatagtttcagggtgctgtggattggggcagcacggaacaccagcggcagatcattgatacctttgtcaactcggtctacgtttttgatgaccgggtcgtactcaatttcaactttacggacgatgccaaaacggtcacccgtgaggaagtgttgggttcgagtgctgtggacaatgctccaccaaacgtaaggccgtttatctgaaaaggtaaacggctttttcttgtatctacgtgatttttgatatgcaaaagtgaagctgattcacttttgcatattgataatgaaacgtgtaggaggcccccttttcagtcgtttgtagcaagtttgtagcagatctgtagcaaaattcggagaggaacggcaaaatggctctgaaaacccgatttttgcagattttttggcataaaattttatccttggattttgtgcagaatgacggtggtgcttttcattcggattctgatgccgtataataaagaaaaagatcatggatgaaaggagaaatcgctgtgcgctacaccatcaggcattttgatttgccactgcttacctttgaagcaaacatggacagtgcagatactgacctccatattataaatgtctacgaagaaaaccgttcctttttacctttgaacctgactgtatcagaagatggtgtagaacgctggctgcggcatcgcacaattccgaagaaccgagcgtatgtagatgctctgctctctaaggtggggctttctttaaatcgaccgcttggaattattgcagccaataaaggtctttcactcaatgattgcttttgggtagatgcagagggctccggtgacacctttgaaaaagtaaatctttacgataaccgattcagtcaggtgctggcagcaatcgcctttacaggatatggcagcagcatacgaacttcgcttgcgtcctgcccggagttctcgaccaacgggatgctgccaaaatgctggcgcagacaaaacggaaaaatctatctttataaaggtggcacgtcagggttcagtaatctgggatttgaaccgtactcggaactgtatgcttatcaagttgcacaggtgatgggcgtgaatgcgattcgctacaccctgacaaaagatctgaaaaagacgctttgttccaggtgtgagctgttcaccagcaaagagtattcttatattcccatcggacaacttgtgtccaaaggtggaataaaagcaatttttgcgtattatcagacgttaggtcagaactttgtggatgcgctggaagatatgctggtttttgatgcaatcatctgcaacaccgaccgccactatggaaactttggtgtgctggtagataataagaccaacacgattgccgcacctgcaccgctgtttgaccacggaaactcgctgttcagtctgggcggaacggatctttgggacaaccagaaagcatttgatgaatatgcccgcacactgcttccgcttgcatacgatgatttttttgcagctgcaaagagtgcaatgaaacctcgtcaccgtgcaatgctccataagctgctggatttccattttgaccgcagagcgacacgttataatctgccgccaaatcgcttgaagatgatcgaaaaagaggtacagcgcagagcaagagtacttttagggtaaaaaagaaaaccgtcaaacgtgagagatttctctcatgcgttgacggtttttcttgtcagtggaggggatggctttccttgaaagtggcgaaaaattttattgaaagactccaaagagaaacaacgagttagatgtggaaacggctacttttgaattttctcgatgagacactcgtgttttttggtggctttatcatagttgatgcccactagcagaatgttcccttgataatctttcaaggcgtttccatagtgtttctccttgatttgagcaagtgcaccagatgcactcttgttccatttcagttcgattactactgcaggcttgtctagatgcatcctgtgaggaatcatacacacatcggcaaagcctttacctgcaggcaactcccgcactatcgtgtaatactctcgtgcaaaatagaaagccagattgatgatacaactcaacgaattttcatcgttatattgaagaactgacacttcttcatgtgctttgtcaactccggcggctacagcatccgcatccatcgcccatagtgcttccagcagcctgcgagacgcttctatggaatccattacaccgtgccagttcatcgtgctgagggcattgacatattcctgcgagacttccttgttgggaatagtcacggattcatctatgctattgtaggtcagataacccaaatgcaccagcagggtcagaacatcgtctttgctggcaaaggtggtcatgtcattgctgaaagtgcccgtgttgatttttatggcttcgcctgccagcattcggacaaccgcattctgcaagccatccatatccatctggatataaattttcaaggcttcataggtttcggtttgattccaataggtgccgaatttgtgccgcagcatcgcatccacaacagatttagggctgtacatggaataatgctcatctccggaccgccgatgcgcaatcaggtcatagccatcataccatgctttggcctcctcaaagctcatctgatacttttcgcaaagagcagacacttctgattcggtaaagccaaaatattctgccagttcaccgggatcggtcatggaatactcagtaaacatatttagtgcagagtgggagccgtactttttaatgggtaagatgcctgtcatgtaggccaatgcaacgtaatccttgtctttgagccaagctcgcagaaagtcaagatatttcttctgcgcatcctgattttgctggtattcccgaaacaggcaatcccattcgtcaatcaaaatcacgaaagaacgatttgtttttgcataaatgtctttcatgacctgaatgaggttgtttttatcccgaaaacggacattttgaaaatggtccgttaaatcaaatacaagatatttttgcagcattgttagcatttcatccatgctatgcgtcatgctgaggaattcctgcatgttgactttgattacgtcatactggttgaggtgctgctgataagatgacacatagtggattttcaaggaactgaacaacgatgcggaattctcaccacggtcatagtaagcggctagcatatcggcagccatcgacttgccgaaacggcgaggacgactgacacagatgaacttctgtctggtgttcaaaacggcattggtcttttcgatcaatccggtcttatctacatagatttcggagtttaggctttcctgaaagcccttgctgcccggattcagatagcttcccatatgatgcctcctatcctgaaaatatcattgtattcattatactctaatccatcaggaagcacaagaacgggttgatcaaagcgaaaagaaaacatcttgtgttgcgcatagcgtaattctcatataaagctcttgcatgcatactcctgcgggagtataattaaagcgaggaggtggttctgtggaaaaaacaatttatcacggttcggatcatattattgaaaagccaaagttcggctatggcaagccctacaatgactatggcatcggcttttactgcactcagaaccccaacatggccaaagagtggggcgttggcatcgaccacaatggctacgctaaccggtataaaatcgaatgcgacggtttgaccattctggatttgaacgctcccggttacacgatgctgcattggctgacgattcttttggagaaccgcgaattcgatacttctgccccgctggccgcagaagccaaagaatacctgatgaacacttttcacctcgactataagtctgctgatatcatcattggctaccgggcagatgacagctatttttcctttgcatccgattttatcaacggcgcaatctcttaccgccagttgtgcaatgccatgcgcttgggcaagctggggcagcagttcgtgctgaaaagcaaagcggcctttgaacagctggaatttctcggctatgagaccgcagactctaaagaatggtataagaaaaaggctttccgtgaccagacagcccgccgccaatatcttgacgtggagcgcaaccgccgtcagaggggagacctttatattaccacgattctcgacgaggagatgaagcccaatgatccacgcttacgataaaagctatctttctgctgcacagaaaaatcttgcccggatgttggattatcttgtcaacgatctgcattatccgttggagacggcatggcagtggtttcttatcagtaagatggcttttcggtttgaacagggggattgttctgtgttggtgggcttgtccggtgtagaacttgcccgcgctgtactggagcaggcgggcgaagtcgtgcccatgcagaaaccctcgtatgcctacgaccgcagcccggaatactggacaggctgggctcttgcctattaccagtggctgaccagtttgcgctttgcggagattgaacaggcagtgtctatcacgaaagtgcggctgctgtatacgccctaccacgagatggatgtacggcagtttgcagacaagatgaacgagttgtaccgtgcggcaaagccggaaacaaacctgaaagccatgcgcacattggccggattgagccaatcggaactggcaggacaggctgatgtgtctgtgcgtaccatccagcagtacgaacagcgacagaaggacatcaacaaagcacaagcagaaacgttgcttcgccttgcgcgtgcgctgaattgcaacgtggaggatctgatagagaaagttccaccgctgaattttaaataagaatgaagcgatgagacctgacacagattgtgcaaacaaaaaaagaaagctgccatccatgagagaaagattctcacggatcggcagcttttctctttgaagttgttatgccttcgttgtggtcagaacttcatcattgaccagctgattggccttatcaaatgcttcgatcatctgggtcgctttcggatggagatagacttcatccagcgttttggatttgggcgtgtgcccgacagcgcgtttcaggatatccttgttgacgcctgcgcggtcacaaaggctggcgtaggtatggcgggtggtgtagggcgtataggtggcaagcttcccggcaaactccggcttgcgcttaccattttcgtcgtaaggattcggctggatgccgatttcctccaggaaaggatagaacttgcgattacgccagttcttctcattccagaaaccgccttttccattgggaaagagcggaccgttttccacagaggtggcatacgcatgttcaaaaaccgggatgccaaagtcgagaatgggaatgatgcggttgcgtccggcctcggtcttgcagccgccgatcagataagcaccggattccgtgcggtgaaaatcttcgtgtttgaagtgcagcagctcatagatacgcactccacaggccagaagagcaattaccatctgtccggtgggagtgttcttttggttcaggatcagcgtcacctgttcgtccgtgaagatttcgcgttccggcgatttacgcccctcaactttcaggacagatgcaaggttggaatccacgacacgccagccaatggctgtgcgatacagcttgctgataagagtacgctctttttccaacatgctctgagacaggccatcatcggccattttatcaaggatgttttggaagtcctgtgcataaagggctgcaattttgtaataccaaagtggttttaggtatttccatgccagatcatacagttcacgggccttatcagaacggcctttgtactcacgagattccagaaagatctcgtgaatttttgctaaggtggaatcttgatatggtgtagcagggcgtttcatcatttcagcacgaaccgcttcggcttcttcacgggtgacataagtgccgacagtttttacaactgtaatacctgtgtgagggtcagggattggcatacggagcagccacggcttacggcgtatcccggacattctagagatgcttccattaccagacgatgctttcagccggggcgattctcgcttggctggaacagtaggcggtgctcctacaccgggggatggcgctgtgccaacgggatgaccgcaggcagagcagaatttagcggtatctgagatttgatgaccgcaattttcacagaacatagatttgaacctcctgcttcaaaaaatgccctcagcatcggaggatactgagggcgaacggttagatcagttacgggcgcgggagagctggtaatccaggctctgctcagccgtgagccccttctggagaaagcggatcacattggggtaaaacacgtagatacgtgatccgttcggtacgtgatttatgtaaccggcggctacgagattgcggagactgtggtatgttatatcataaccttcgctccgtgcacgacgtgcggcacctgttagtgtaagaaaatcctgttgcttatcaatcataatttttctctcctttcgtaaaatgatggaaagcacaggcggcttttcataataagcatatctttttgagatataggactcttaaagggcgattaagggtaccagggaagatctggctcctttgagaagtcataacgctccaaagaatgtaaatcgggttgtacttcctcatattgggcgtttaaaggtggaacgacatagccgcagttaaagaataggctctggtcatgcaacaggacaccatcacaatcgatgtatccacaatcgccggagtggcaacacggaggctctgcaaagaaaattggggcgcccatagttgaaagcagatcagcgtactcgggagaaacagggttttcaaaaaatccatctgggatgttcatgataaatcctcctattatttaacggactgtggtaggtcaacattcacctgaatgcaatcagtgcacgggtgagtctcgtctcctatgtaaacgtattcggacagcagaagacactggccggcttttaatgttttgagcagttcagctgtttcggcacggtgctgtgggggcgccaacatctcggaacatgcccgaagttctgtgagtggtggcttaaaaaacagcttggttccagtttggctcaacgccaactgctcatctgagctaaaggctttcagagattgcgaaataagtatggaaccgatagaaaaccgacgaccttctgtgatgatttgattcaaaactgtgcctcgaccaagctttagattctgcacttcatcgaccataatgatgattggagtttgcagcgcacgggcagaacggaaccaatcatatagcagaagttctgctaggataattcgtatgccagcaggatacccgcttagatcaaagacgtgaatattcggagaaagcgggagagaagtgctgcctgttttttggaactcgaatacgttgttccgcaaaagaggtcttagacgattggccagtgtgcgggcacttgccaaaccggagttctcaagttcctcaagaatactgggaaaaattcgtagagatgtctctctgcaatctacacgggattttatagcatcggtaagaattgcggcctgcgtaggccccaaccgataacctttactgatgatctcagataatccataagcagtgtcatatgaatcctctatacagccatcgtaaattttaggggttattaagtcgcttgccactgcttttctatacagattatgtcgtatcacaagcgattcaaattctggcgacagagccttgcaaatgtgttcgggagacattgtttggtttatgtctatggcaagtgcaggaataccttgtttaacatactggatagcaagacttatactagcagtacttttaccgcttcctgttgctcctgtaataaatacactggcggggtcaataccgaagcgaaaccgaagataggttttgaatctttcggaaacctcctcgtagcttccgggtgtaactttaatttcaaagtctggaatcaatgaaaaaatctcctttttatgtcaaatagttgtaatatcgcggcgtccatgtccattcacaaagctgcgattaattgatcgaagcctgacatttttggaatgcccggtagagagcgtgagcgtctttacgatagagctcgaaagaatgccagcttcagtcagctgagccagaacgtcagatgtaagaaattccggcatgcgctttgcgaccaaacgtttcacaagatcaagggtgagatagagcttatactcatcatatagtacctccttttctttgcaataagtctcgtctaaatcaccaatgtcccggaatcggatggtctgttcgcgtgcagctgcataaagggcattgcggaagcaatccgatgcggttgtgtttagcatagaatcccaccgggaaggatagtgatcgaaggcggttttataagcatctcgaaccttttcttcggataaagacgctttttgaaaaaacgtccagcaaatgatttcgcttacagcacgtaaaacggcaatttcctgacaaaaacttgatccttccattctgtcacgttcctccttatatgcgcgatacacgcgggaatcaaattcgtttggattgccctctaccaaggaaatcaaatcaccccatgttacagaatctacaccggtagtagcggagcaagcctctgctgaatttaactggatcggaatgcaatgctcacgaatctccggcgtcaattcttttgcctgaacaatgtagatcgaacgactcgcgcttcccttctcggcttcatcggagaggtaatcataattcgtagctttctgataccggttggacgcaaatccaccacggacatggatgagcaagtcgtctcgatgatggatcagctgctttttaagctcggcgagcttgcaattgagagtgatttccgtagtgatcgaaaaactctcagagatcacagcaaacggcttagtcggctgcatgtcttcaggaagacgtgtcttcaagaaggataatccgatgactgcggccattatcagttggtcttcggatgtcagagcatcaggacgaagaatcggactatccagcggcgcctcacatcctgccgactctttgaaaaaccatcttgaggcgttgatattccacccaggtataggttgaaaatagatctcgtgcttactcaaaagctgcgcaacgagcatataaaacaaccggggaccatcttttccacagcggagtgtgccgccgcttttgtaaaatccttgaatcaaagcgttctgctgaaatttgtcatcggcaacacggaagcctgaaagagttccgttaggaagtctgtaccggacttcaatactcgtagagccgtcccgtggatcgatcgcatatcgagcagagaattctgtacagtctgacacgggcttgataaacttgtagggttcaccaagagggttttccttaacaaggtagtaccttccatcgggaaattctacgagactctctgttttatatgcggtgaattctcgcaggtaggcgcgattagctgctttacaaagcggattctccctctgctgctgtagagattggcttttgtttttcaaagcggcgttctcttgctgcaacgccatgttttgcacctgaagattactacaggtattctggagcatggttactgcccatggatcaacgagccgttcatctccaaatgtgacacctggttgcggaacttgcggcgcttgataagtgcccatgcaatacatctccttttttctatatttagttttcaaggatcaactgctacgtttccttcgtagcaaggtgccggtgcctcaagggctatgctgtattgtagatcatcgttatacctcctgccggtcatgtgtgcatcgagtgagccttgttttgcttggctcagtccccggatcgcttccggtgaccatattgtacaacaaaatccacatgaataaaattcgcagtacaaaaaaatgttgtttgactaaaaagtgtattgtaatataaggattgatgcaatatactaataaaaatgaatataataaaatctaacttttgatataaaattaaatcatatgaaaggaaaaacctatgaaagtggaagaatttgtaaatcggatagatgaagccgagaaggtgctgaagtatacttttcggctaaattttgcagcagccgaagatcagaagcaaggaatgccagctgaagaagttgcaaatcaagaacgcggattgttggttgaagaggcagcagaacaggcatacagaatgtttgcgccgtttgtttctgacagatggaatggccacccgtttttaacaaatcgagttcgattagacgaactaaataaaaatcttgatattggcatactgactgaatttcatgaaaaaaggaaaaatatgctgataaaggatgccatagtgagcgtctactgtatggtacgagaagtagttggcgaggaaaacagaataactgtatatgcgtcgggcgaatatgctttttttgatgaggaagcatttgttgaagaaaaggaggctgagcaagataaaaagaagaaacgaaaaaatctaagcaaatacattacaggaatggacgacctactggaaagaggcatttatcataaatttggagagggaaaaaatccattaaaggttgagaaagaccatgtggaagccaatcgagcagaatttttacggagcagaaatcaaccattaaaaagaagcataaatggccttgataaaaaacttgctgaagtgtcggggtataagccttttataaaaaataaagaggttaacgtaaaaggagaaagcgtacttagggagtttctaaatattagtgatttggatgtaatggcaattttcagaagatcgtcatcgcggtggaatgttgttgagaaaatagaaaaaagcaagagcgataatattggtcttgacatcgaaaggcttcaagaactgaatgggctgtataaatcattgaaccagctggagtctttacgtcatatgacagcggctgataaactgtatgttcaggttcaaattgaaaaagtattgaactacaatatgatggtatgcctttggaaaaatatatctgagctcgcaaattcaagggccaatattttactttttgatgcagaatcaattgagacaatgagcaactgttttaaaatgaataatgtggtttgtcgtgctgagattgtaaatatggaatttgatggactgagagactataaagaacttcaagagaaaaaagaaaaccgtacaatggacacatggaagacagaacttcaagatgtttttggaaaaacgattgcgcgtcaaaatgatgagcaagatttattcgacctaaaccgttggaaagctgtttataaggaggatatcgactcttggacaaactgggcgtttccattgtttttatcatgcttttgtgttgtgctaagaaaaaatattgaggaaaatatgcaggaaaagggacaaaatgttgtttgcagaatgtacaatgaactgtctgagtacatcaaggaaaaagatgtaaaattagaaacaagattgtttgatgaaaatgatatgagggaattagaacaaaatactattatgctaaaagctctgtcgggttatgtgactagagcgatagaaaccgcacaggaaataaaggtgccaataacgctagaagaaatcgacactatgatgcctaagaaaaaagactactatttgaaatattcaaaactacagttcttaaaaagaagtgaagcagtgttggcaggaggaatgagtgtaataaagtttacaatctgatggtgttcctacacttctgaaaaaatttcagcgttaaatgttccctaataccaggaaaatgggaatgttccaagcaaagtttttttgaaagtgtaggaacgaaggctacattatagcattatgacaccaatttagggcaaccacgtaagtggttgccctttctctgtatctggtatgatttgacattcggcaacagtatagtaaaccatcaaaggaggattggccgttatgtttgattattatgatactctgataaccccggaagaagttgccgatatgctggggtgtggtatgaacaccacctataagcttttgaagtcaggaaaaataaaagctatgaggatcggtcgagtttggaaaattcctaagagagcagtacaagaatatattgtgcaggaagctcatatgaaagctactggatggtaatacgaaaaatgcccacatggataatgactccatgtgggttttctgttgcttgaaaataatgtttgatagaggaatgcacatgtagataatccaatgttaatgctaaataatgcatggagcagaaggaaggtagaagttgatctttattaaaggcactaacattagaataaagcggccgaatggaatagttgtagtacaaacggtcgcacaagaacagccgaatgtgtagtgtatatacatttggctattcttgctaggggggaggcggatgccgtcataaataattttttatttttgtttttctgaatttgttcgcgtgaaactctatggatagaaagaaggcattataatgggagatactgttaatatacgattgactgctgaagataaaattcatctacaacagagaatggatgaaactggtaaaaaagcaacagaagtatttaagagtgcaatctactttactgaaatagatgcagaccttgttgatgaaatcatatctaatattggaaattatgcgagtgaaaaaaattgggaaggagtaaaagaggaggttcataggtatgtgttatatcgaactcaaaaatgataagtatgaaacttcggaggacttaaaacatttattgcaatatattcttagattagataagacagcagaagatagtcaaagagcgaatactataacaaataccttagcaggttgtcagccagcgatgattcctaatgaatatttgtgtgatccaagtgccgtttataacctgatgctttttgaagttaggagaagacagaaaggaactacgcagtttgcaaaacaccgcattgtttctttcgcggcaacggattgtattctgccacaggacgtggtatctctagcagagagaattgcgagcatttatgcacagaaaggctttattacagcttatggaattcatgcggatagatttaatgtacatatccattttgcagtttgtgcagtatcgtttcaaacacagaacatgtttcatattcagtgggaagctgagagaaaaatgctcgtgtcagtaacaaatcagtggaaatctgagttcgacgagatgcttcaaaataatatcccaatgaggcagtcaagagaagctgcattgtatggtgacgatatcgttcgatacggaagcgttccgataactgcaaaaggtcaaatggtgcaaaatagacgagctaaaataggtaaataaaaaaggagatagcacaatggataagtttgatgaaaaagtgatcggttacgattcgataaaagaaacgctgcggcagatagcagatgttcttaaacggccggagtcttataaagaaaaaggggtgtccatgccaagaggacttctgatggagtctgcccccggattaggaaagagcctgatggcatcgatattgatggaagagtctggacgaaaatcctttgtctttcgaaggatcaacgaaggaaatacatttctgggtgagatgaaagatatctttgacgttgcaaaagaagaggcaccgagtatactgctcttagaagatctgaacctttatgtggaatccaattctccctatgctccggaatgggcttgtttacaagcctgtattgacgagacaagcgatgcggatatctttgtaattgccacgacaaatgatacaaggtacatgccgcagagtttattaagaccgggaagatttgactatattctgaatttgaatccaccacttggtaaaacggcagaaaacattgtaagctattatcttcgtgataaaaatctggcgaaagatgtacagatctctgatatcgtaaaggctatgccgcaggtgagctgtgcaacgcttgaaacggtaatgaatctcgcggcaatcaatagtgtctatcgtgatcatgcacatgttcagaaggaagacattatagatgcacttttaaaagtggtctataatctcagaaaagcggactgcgaggaggatccgcaggaacatcagatgattgccgtgcacgaggctgcgcatgctgttgtgggagaggttctgcattctggtagcattgggattattacaattcgcggaagtcatggtgctattggtggtatggagagtgggtttgctgtttatgctaagagcgaagaagaatttcaggatgagatcataaaaaccttggcaggcaaggcgggaactgctttgatctatggaatcatggacattcgtgcagtggctgatattaagaaagcagaccagcttctggatatctggctgtgtcactttgctggtggaggtttttcaggagttgaacctagcgaaaatagattgtctgaaccaagactttcctataatgaagcaattaaatcagcaaaactggaagagctttaccgcagagcctataagattctctatgacaacagagatttcctacttgctgtccagaaagaacttctggaacatgaaacgctgctgaacagtgatctggcaaaaatccgggaatcctgtacctaaaccctattattcaaaaggataaagcggtcaagctttttgaggcttggccgcttttatctggcaatatgcagttgaaactcagggttcttcctctatatataggaaagcacacagcattttagtaactgcctctctttgagcaggagagagtttagcccagagatcaagaagcttcttttgctccttcgtcagataaactgagtcctcctcctgaaagaactgagagagggtaatgccgaagcctgcacagattttctcgatagaagcaacattcggctgaagatttcttctccgccatgttgagatggtggattgggtcagcccggagttctctgctagggcatactcagaccagctacgagcaaggcgctcctgctcaatgcgccctaaaatatcaaatgtaggcttctctcgttccatggttgacctccttgtaaaaatcgtagtgattacttacgattttattgttccaaggcttgaccgataattgtataagtcgtatactttgaatagtaaaaatcatattactgccgtctgatttgggtgatatgacacaagaagaaaaacgattcgacaaaatttgtagtaaaaagatccagaaaatgatatggtagacactccctgtccatcttcgttgttataatgaggctgaaccaaagaggaggacaagccaatgacagcagacaccttaaaaacgccccgtgttttggaactttatcaggattttctttccggtaagcttatcaataagcaacaggccgcagagcagtaccatgtgaacgtccgctccattcagagagacattgatagtatccgggattttctttcggaacagtgcgccaaagaaggcattgtacgaaagattgagtacgacaaaaaggaaaatagctaccgtctggtcacacaggagatcgagcagctttccaaaggtgaagtgttggccctatgcaagattctgctggaaagccgagcttttacaaaagagcaggttgagaagcaattacaaatcatcctgaatctttgtgtatctcagaaagaaaaaagcgacattgagtggtttatcggtaatgagctgttccactatcacgacccggctcatgcagccgttgacccggacaatctgtggatggtggcacaggccatccgaaatcagtcggtgctggaaatcgaatatcaaaagctgaaagaccgtcaaatcgtaaaacggactgttgagccagttgggttgatgttctcagagtattatttctatctcatgggtgttatcacagatcactccaccagagaggctttccacaaaaagaacgatccttatcccaccatttaccggcttgataggatacattccatcaaggaaaccggagaaaagttttctgttccttacaaagaccgcttcaaagagggcgagtataagaaccgcactcagttcatgttcggcggtgaaccgcagaacatcagcttcaactactatggcccatcggtggaagctgtgctggacaagttccccatggcaaaagtcgtagatgaaaaagagggtgtctgctctattgaagccgaagtctttggcacaggcgtgaaaatgtggctgctcagtcagggcagcaaggtcaaggtgactgcaccggaaacactggtgtaggagatgaaaactgaaattcaaagaatgcaggaacgaatgacgtaaaatcttaggaggatgtatgagcagaatccgaatcggttcctttaatgtacggaatcttgcagatggcgagggccgagatttggatagaattgccaaaatgataaactattatcatttggacatcgtggcgttgcaggaggttttggcagaaggaaaagttattggaggaattgacttaaaagagccatcagggcaagcaaaggcttatgatcgttccttgaaacgccgcttgagtgggccatgggacagccaatgggcgcagcccggtttgtcacgagagaacgagccatttcgaggtgaagaccgacgtggtgaggggtatgcaattctctggcgaacggataagtttgatttgccgctaggacgctggggcgaaccatacagaccggaaattctttccaattacaatccggtgattgcagaaagtcaactccgattgattcgagatccattatatgcgcgttttttattgaaagatcgccatgttgcagaactgagaattcttgtgacccatatcgtatatggaaaatcgggagcgctcaatgatgtgattgactatagtgctgcaaaaatgcggcagaaagagttcgatattttggccggacagttgtatcgacgtgtcgcagaatattataaggttcaggactgtacttcgccttatacggttttgcttggagattataacctgaatttgggagcctatccggcagttccggcagttgcctgttttgatgcaaaggggaggcccgtagatgaaagcagagcaaaagcgtacatttatacatatcagactgatgcaagtacaataaagcgcgacaccccggagtatgcaaataattacgatcatttttcatttgatgagcgaacccgacgaattgttcggatggacagcattcatagcatagaccttgtgaacaagtatacaaaatctgaagacgttacgcaggagcagcggtttgaccgttaccggaaagaaatatcagaccatcttccgattatgatggaagtggatttataaaaggtgaatgatatgcagaaattacaagtgtattcagaagacgaaaaacgcaaagcggcttatgcacttaatctgtgcacggtttctatttcccagatagtagactacaatgatgtttatgttttggagcaggagtataatgctattctgaacaacctgaatctggaagctatgccaaaagatgaagcacttttgaagattctggtggagacgctgaatacgattacgtttttcagaattcaagaactgaaaaaacaaaaagttgagagtgattaccaacgacgcatgaaaaatgcaatttggtctgcggttccgaacctcagtgtgattgtggcgggaaatccgattgcaatggtactctcagtggcaactcaagtcggaacagcatacatgaattaccgcagagaaaaggccaatgcggggattgagaaagaaaattcggaatttgaacttcaaatcaccgcgatggagcagtttcacgcattacaaagagaattgttcacaacagcatggcgtcttgcagattcgtatgggttcaaggatgaatggcgtttgacggaaaatcagatcaaacaatatgatcaagttttgatggatgcagacgaataccgtaaatacgctcggttggaagcaattgctcccaattttgaagcatacccgccattctggtatttctatgcgcacacggcactatatatttcggaaaatgaaaccaatgcagtggcaaaagcggagtatcgcaaccgtgcaaagaaccactttgaaaaatattatcaactgaatcgctttagtctgctgcgggaagatcagctggctgcatctgcattgctggagtattcggatcttttgctgctggagaatgcaaaagaaaacaccgaaaaagtatatcagctggttatggaagcacagaaaaaggctgggaacgcaaacgatgttttgcaactgtgtgcaatttcgtacctcaaaattggaaagaccgaagatgccgccagactgctgaaatatcttgttaatgaagaatacaatccggctatgaatgcaaagattctgagcagaatctatgttagccagtatcttgcaacggaaagtccggcagcatatacagagtacggaatacttgccagaaggattgcgccggagtttctcttcccgatgccaaaaggaacagtttcagaccagtcgctggaggaagcctttattaaaaggcaaaaggtcgcactcatcaaagcatatcgcactacattacaggactatgcgcggaaagcaagagatgattacgaggatgcactacaggatttggaaaaatcttgctacaaggaagaaaatattgcactttggatttccaaacttggtacaggaaaatacagccgaaactgtgtcgtccagctgaatcgaatggttgcagggctggatacacttcctgttttccgcgatttagaaaaacgcgaggtgctgattaaacttattgaagggaagttgcggaataccagaccagcagttcaaaatctacagaaagaaacaacaaatacctttgatgaggaagactatgagaagcttacagaactgttctcgtaccaacggctgacagaagtgttttttgacaagttgaaagcgagagttacagatgaaattgtaaactctcaggaactcggcacactaaatcttctggaaaatgatttactccagttttgtgatgcacaggaattgccgatgccgcaatgtttgaatctgacacgtgaagaacaacagcttccggaagaaaagggaagcctctactttgatgacgtgtttttggaagatgctctggatccggaaacacaggaacaattggaaaagaaaatggaaaaggtcatcggcgcagccaaaggtcatattataaaggacgctgcaaatgtagcaatttacctacgaaccgaaaaattatttgacttctattttgaaaacaaaaagctgacaggggcaacaaaatatcttgtaaaacagaaagcagccgcagtaatagacgataagacgaataaggattgcgatttgatcctgacagttgatggtgtggtgattgttaaccagaacaggatatcgaacgaaaaaattccctatgacgctatcaaattcgactctgaagcgggaaccgacagacttacaacgagctataaggacgtatgtgataatgtcgcgattgacataaaaggactctatgcattgatgcaggaactggataaacttgcgtaacaggaggcagcaaaaaacatgaacaggaaaaataaagtagacattccagatgatctgaaaaccaagtgcaatgttattattcatggcgcatcaactgcatctgctgcagcctgcgcgggaattgcacagattccgttggcggacaatgcggttttggctcctattcagattgcaatgattgtttccgttgcaaaagtgtttgaccagaacatcggagagggtgttgcacgcggcttgttgagcacctttgcagctacatttgtgggacgtggtgtgacgcaggtactgtttggctgggtgccctttatgggaaatgcgctaaatagcgcgactgcggcagcattgacagaagcgattggatggatggccgtagatcattttgcaaaggggtatcagttggatcaattcgagtatgaagaaacatcggacaggaagcgagaagcagaacagaaaaaaacggccgatgaggaagagcttgatattgatctgtggaaaaaagattttgaaaaacgggcacgggccgcacttgagaaaaatgatccggtagaacttgatgcacttgtgagtgaatttgaaaaaatggagcagaagcttccggaagatgaccccttacgcgaattatacgataaacttctggaagcaagatgctaaatgtatagggcagaggtgactgcaccggaaacgctggtgtaggagatgaagcaggaaatcgaaaatatggatgtgcagtataagcagatgggaggtaaaacaaatggatgaacagttcgtacatgaagaccaaatgcgaaatgcccgaacacagggcgtaggctctatggtgtcagagcagaaccgccagaacgctttagagttgatgcggaagatgcacaaaatcgacacgcagaatgcagcggctaaggcgagaatcgaaaacaatctggataaagcactacaatgcgttgataacgtccgtgattttgtaaatgccccgaaccatgtattaggaaatcccagtacaaaacatggtgagtttgcagagcaagttgacatcaacttccataatgcagatcaaatcatgcacaaccgtaggcctgatgcgtcaaaagaaggcgttgtacggaacgcaccgcaggattattatgtgaacggtgttgcagtacaatccaaatattgtaatggagccaataattccttgggggatgttgtagagcacttaaagcagtatcaaagcatcaactttggacaggatggaagttactacgtgattccaaaagatcagtatgaattgctcaagcgcatacggaagaatgaaaatggtcagtatgaattgattaaaagcacgcagaagaatgacacggagaacatcagccaaaaaacaattgatgcaatcggcaaaaaattagaggaaatcaaagcattatccggtggccgcgaattaggagatattatacggcccggagaaacggattatgcagcagtccagcgtggcaaaatcatggaaacgctggataagaaatccgaccagttgaaccagactgccgacaaccagaagcagcgtgcggatgagcgcagcgataaaaagcgagaacaagcacagcaggaagcagcaccgtccttgcaaaaggcaggaaaagctgctgcggaggccgcttttatttcgggtggattccagttggcggttggtatttacagcaagtgcaaagagggcaagaaaatcaacgaatttacggtggatgactggaaagacattggcatagatacggcaaaagcagccgcagagggtggtatcagtggctttgcaatttacagcatcactaactttacaagcatttcggctggccctgcggccgcaggcgtttcgttggcattctcggtatctgagctggcatatcgcaagagcaccggggcaatttccgatgaagagttcaaggaaagctgccagatggctgcactgaacgctgctgtaagtgccgttggtgctgcaatcggacaagaactgatcccgattccgttgctgggtgcttggataggctcctttattgcaacccaaggcttggagcggctctgtgacgaaggcttccataacgcacttacaatgtccgcctacgaagtgcgaaaaatgacacaacggctggaatacggaactgcacgcattgcgtacagttctgcttatacaaatcaggcaatttctcaagcgcagaccctccatgaagagacccaaacgcttctggatgatttcaacagaaagaaaaggtgatttttatgacaaaggaacaatgcagcttacaaccgaattattacggcagttcttgtgattttcaggatttgcagtctgcggtgcagcagttgacgaccaaatccgatgcacagtttgaggaactgaaaaacgagaagtggttccatcgtattttcaatatggtggtctgtcccagaaaaaacaatatccgcatggcagagcagatcacttctttggcacaggcacagggaatcctgattgaaattctggttcgtctggccgatcaggatgccaatatcgccgggatggtcatgcagtcccaaagcgacatccgggcactggctcagaacagtgcttatcttcaggagcggctttatctgctggaagacaagagctatggcatcaaggaaaatgaaaatctgaaggatttgaacggtcagcagcggaatattctttccggctgtctgaatgatgcatccaagctgtatgcaatgccctccaacgagcagcgtttgtatgctaatgaactgctgaactatctgcaagccgatgcacgggtagaaaatctggaagatgcactggatgatctggaagataacaccaagcggaaaatcctgagctgcatcatcacctatatgtatctgtacgaccatactacggagtcgatggaacaggatgaacaggaagacttcatcgacctgtttgaccttggccgcaagaccatcaaatccctgaagcagcagactgtggacacctatcgtctgcgtggtgtggacggctgcattgaccgctatatcactgcacccattgaaattaccgaagagactccgtttgaagtggagctgccggagccgaaagccgcagaaggagcctccgaagcacaggccgaagaaaatggtgaagaagccattgacacgaatacgtcccgtgaaaaactggtactgtccggctcgattcagaatgatggtgaaacggtctacaagaataaggatattcacttttcctctgccattatgaactgcaaaggcactgtcaagtttattaactgcacaattcattataacgaggacagtggcagtcatatctatttgaacaatgaaacagaactctccattatggcctctacaataatttgccatggagactgcaaaaaaggaaattacttcattcaggggataaatcgtgcatgggcaaaaaattgtacgataaaaaactgcatttttattgactgcgttggatttattggctgtggttgtataactttttgttttgataacaacaaagtgcagggtacttgctcggaattttttagctttggtgtgaaagaagaagctaaaattagtaataaccattttgtattaccggataagccgacctttgaatttagagatgcaaacgatgctatcgcaacaaattttatttattgcggtggcaagaacgtattcatcgaaaacaatatctttgagtgtgaaaagagcatcaatgcatcgtcttacatggtagaaaacaacattcgtgtaatcaagggttccgcttggattggctatgacgaagaaactgacaaaggaacggtttcaaattgtacatttgtgcgaatgaacaagtgcattgaacatatcggaactgttaaggactgcatctttgaaaaatgcagcgaagcaattatagagtgtggattcctcatcacggagaaccgttttgccgagtgtaaaaatgctattgtgaacctttgttcaagagcaactttgtcgaactgccaatttattgactgcgcagggaaagaacttgtaacctcccgttggaattcacaggttacaattcatgattgtgaattttccaatgtttcgctaagcccggtcaactcagtggaagaaattgagcagattggggaactttgtctaaaaaattacattcgagagcttattccgggaaagttttccacactcgatacaaaaggtgtgttgatagaaatcggaggtgttgacaagaaatttgcaaactcaaatcgtccgagcaaaatcgagcggtgcatttttaatggtgtccatatttgttcagaaggcggttttgcctgtaacatgggcaaatggaaagcctgtaaagcagaccgaaaccttacaaaagatcaaatgaactttttgatttccgtatataccgcaaactatgacaagttcaattatcctcgtgtgatcgtttctgattgtacttttaagaactgtgcatctgtacatcaggaaatcataaacaccgagccgtatgattctgtattcggttcacggcacaactatacagccattagcgtccgcaacaattatggcctcgataatatcggagatcccacttcgtatgtgaaatccagcgatgtgaagctcaaggaaaccgatgccaacggaaacaaaatcggcagctccttgtctgtgaactaaagaaacctgctaaaaaataatccgggacggcttttgggggctgccccggattatttttaggtaaaggatttgagcacttctttcagtgcttcacgctgctccggggaaagctgggccagaagctctataaactcctgctgttcctcttgggtgagcctgttctccggctcagaatgattttggcggttcataaaagatacttgctcctttcggcaaatcctgcgcggctatcagttcggcacgaatctgacgcttgtacttgtaataggtgttccgggcaagaccggtgagcttcatgcaatcggcatcatcaagtgtaccgccaaaggtcttgcagtgggtgcggatgatctgcttggcttctctggcttttttcgtttcaaatccaacgccctttttgcggccaacctgcttgccgttcaaccgggcggtcaaaaggccctcgcgggtacgctggtgcagatcggcaacttctttttcggactgttcaaaggccagtttgatctgctcctttgccaaggccatcagatactcgttgatgcccttcaagatgaagtccacatttgtccctgtcatggcaatgctgccggacatggcttttttgtaggtctcggtgtcgatgtggtgctctttcaagaacaccagccggatgcccttgtggtaaaggtcttcgtacagagtaaaaccttcttctgcatttctggacatccgggacactgaatcgaacaccaccgtatccccggatttcagaatccgatagagcttcagccattccgggcgaaagatggacgtgccggtgtaggcttcctgcacgatatgggcagtcgggtactcagccttgatgttgcggatctgacggtcaatgctctgctttgccgtagagatgcggcaatagccatagatgttcatgcgtctcctttctggctcaaagataacgagcgacatttttaagactgtgttttgcaccttgaaatggtctgaaaacggctgattttaatacaaaacagaatatacggtatttttaatacagttttagtgggcataggcagtcataaaatcagaaatggtagtgcacggtttgtgattggcggtgtcctcgccatccaaaggagcgtagttccagtcggtgtcctcgtcaatatatcgccgcccatcatccggcagttccagcggttccgcaagaataatggtgccccagtggttgaccatcacaaagggcgcgatctcacaagggatgccccggcactcgtcatcatgccgaacatcgtaggcgtacagaccatccggaatggtatctctcttgatgcggatgctggtgaacagcgcaggctttccgcaaactgtaatctcctcgtagtgttcggtcattgcattaaaggtcataatctgtcctccttagatttcaatgataaaagctctgaatttctctttgtagaaatccattgtactctgcggcagggaagtcagattcccttcgttgtcacatccggccagaaatcccggcccagcaagaacgtcggctccatcccacagcggacgattgagcggcaggccaagcagcttgccttcatcattgcagaccagtgtgacctctgaaccggtatcactcaatgtgatgcattcgatcagcccgcctacaaatttctgcatggcttcaagggtgttgtccagctcgatctcctttggcagttccattggcaggagcgcaaggactttgattttttcgtctttcactgtgtgcctccaaataaaaataggacaatccacgcggactgtcctgcaaaagtaaagggagagcatccgaagacactctcccagttgtacatataattttttgctcagctgatgccaaactctttcatcagccgagcacggtactccttatcttcagaagcccgctttgcatcttcaatacggttctgatcgaacagcttcttcatcagcaaagccagcgtatcttccccttcggcttttccctttgcaatgcaacggttttccactttatcaagcacatcgcacatattgtgtgggcctccagtatagtgtttattttttgcgtaccatacaacgctttttgaagaatgcgatgccatagcagaggatgtcatcatagtcatcccggaagtccgccgcatacatccggtcattgatctgctgaatggcagtatcacaggcatctggcagagcatccagagttttggcatacttggcttcaaaaattgccacgcggccattgcggatatcctttacaatgacatcgctgcgcccctcgccatgctctttgttagattctaccacatagccagcaccagtaaagatgcctgcaaggaaagcgtggtaaaaatcctcccggtagtcgtggtagctgatggtcatacgcagcagcttggtcatctcttttgtcagagcttcgttgtttccgctccagactgcatcaaacaacgggctgcggttccatgcctttgcactgtcatcaaaccatttgcttacagtggtttcaaaaatttcccgaatctctgcattgggaatcatcaacgcagagcagccatccggcagcgaatccgtcagatccttatcccgcaccttggtcagatagcctgtcagatacagcacactccaaagattttcctcagaggagtgcagataatcgtaggtcaggttttcttcaatatgctgaacaatagagccgccagccatcagcgtttcaagctttgtggtgatattgtcgcctgcatagtcgatgaaagaacggatgatggcgttatcactggtgtttttccaatagcttttcggcttctgtgctacaccatactggaaatcccgcagataactgatcacgtcccatggacaataaatgtctgcatcgccaaaatgatagccgtcgtaccatgccttgatttcagcagactgcgattcaagatcagcatctttcagcatttgatctatatctgcctgtgtaaaaccaaaggattcgctcaaccggggagaaagaatcgtatccgaaacaaaattgttcgtcccggtaaagatgctttcttttgcaattttcaggcagccggtaataacagcaaagtcaagcgaagtattgtctttgagcgtggtgctcatcatagcccgcatcacgtccagcatctgcgaataatatccgttgctgctggcttttgcaatgggaacatcatactcatccagaatgacgaccgccgattttttgaagtggatttccagcatccgggtcaatagcaaaaagcagcttttggtttcatctatggatgcagtgcgtcccagaattcgcttaaagatgcctttgtcatcgtcagaaatagcagcgtcatccaaaagaaactgataatcctgaaatgcaaatgccagtttcatgcgcagcattccataggcgctttcaaaggtcagaccgtccgtatccttgaaagagaaaaataccacaggacactggttcatccattttttgcaaagctctgtatttttggagatcgccaatccctcaaacagttgcttgctgtctttgcggatgtccagaaaatttgcgagagtgctcataccaagtgattttccgaaacggcgaggacgagtgatcaatgttacttcagcgataccaccgctaagaagttcagaaatcagattggtcttgtcgatataataatacccgccttctcgaatcttttcaaaattcgagattccaacaggaaactgcaaatctttcatgcaatgctcctttccgctcacagaggagagctttcagaactcactactgtaagtgtaccatgaaatatagaatcatacaagaatcaagtgacatcgaaatagagcagttttattatgctacgttcaatctggtggctttatagcagtcagcgcacattccctcatgggtggctgcaaactctgccgcctgcatgatggagccatctttcagcttgaccctcttgataggctggttgcaccgggcgcagatgcagggcacaggcggctgttcctgcttctggctggtggatttcggtttcggctgcttttgcggctctgattccggctgcggtgcagcatcttccggcaaatcctctccggcataaacgtacaggccaagaccaaacatagcaaggttcttcaccaagcaccgcatgatagccttattcacatcgaacatggaggctgcttctacggtgcgttcttccatgccgactttctcacggcggcgagtctgtggattgtagtcccatttcggagtggtataggtgtaaggcacagctttcatggccttgtttgcgccatccagtacaggcagccacatttcatgcgaaacgccctcaatcgtgaccgaggtgtacaccataaagccggttatggggtcataaacataggggaggccgttgaatttcttgacctcgtagctggcagaaggatacagctttttcacctctgcccaggcatacgcccagcttacatatttcagttccgtgctgccggactttttgacttccagatgatctttgaagtcgatagcaaataattttacgaatggattttccataagaatgcctccaattctgataaagaaaaaagggcacaacagcgtcaactgttgtgccccatgatgtgaaaattacggattgagcagaaaatcaatgatgtttcgatgaatgattccgtttcggcttaaattcgccaaatcaccactgataacatacttaggatagttgtcgtgcagtcgctcaagattaccgaactcccgttcttcatcggcgggagtgatcaggtaagcaacctgaatatagagcttttcatctccacggtagcagataaaatcaatttcggtgtcgtccagcttgccgacctgaacttcatagccacggctccgcatttccagatatacgatgttctcatacagcttgttgctgtcaagtttttcgcttttcttgataacgttccgcaggccaagatcgactgcatagtacttttctgtgctggacaggagcgcttttcctttgatatcatagcggcttgcattcagaaggataaaggcttccttgaaataatcaacgtagttcagtacggtagcagtagttgtcttgattccttccgaaaccatgcgtccactgatattacgggcagaaaacggattgccgatattgtccagcaggaatgcaaggacattacgtaatgcggtctgttcgcgaatgttgtggcgcagcatgatgtcacggacaatgatagcctcgtaaagatcgtccagataggtggtgattgaatgatcgtcagggaggaagaaacgctgcggaaaaccgccgtacttcaaatagtctgcgaagagcttttcatccgaagtataggttccgttttcaatgcattgctgttttgcttcggccagcgaaaaggggaaaacctgaatctggatgtatcgtccggaaagataggttgccagttcgccggaaagcagcttggaattggagccggtcaggtaaatatcacaatcgaaatcgacacgaagagaattgattgcaatctgccagcgctccacctcctgaatctcatccagaagaatataaattttgccggtgcagccttccgctttttctgcgatgtagtcgtaaagcgtttctgcagtacgggtgttgcggaagcgcatggactcaaaattggcctgaataatgttctgtgcgggaatgttgcgctggaggagcacgtccttgatctgaccgagaaggactgtttttccacagcgccggattccaaccagaactttaatcagatcctgatcgataaaaggaatgatcttatccaaataacttttgcgcagaaccatcgtgcatcacctcatattcttatcttagcatacaattattgttgtgtaaacagtattgtgcttttctattaaataaaaatagctgaagcgcgaattttgtgtgcctataggcgtacaaaaattatgctgcatggataatggtaaacctgcggctgcttacattcttgctgtaccgattgaaaatatcgggctgttctttcttcaaacgctgggagtctacccgtttactttcggaggatacccaggacaccttgtagcccggtgctgtaccataggcggcgtcctgcatctccaacttcacctgctgttcaatagaggctttttcctgctccagctgttcgatctgatcagaaagctcctgccgcttatccaacaggtcgcggatgggattcagatcggcagttttgtttctatcatctgcagagtacagctgattgatctgctgtgtatccccctcgcttccggtaggtacaggcggaatttcgggcattacgttgtatttccagaagtgctcttctctggcaatgaggttgttcagaacttctttgtcggttgtgatcttgtgaatcaccagctccttcccgaaaatcagagcagcaatgtaccagcagtcaaaaccgctgacagccagatagtgattgacctgagccatgtaatgtgcagggattttgccatccgcccacttgtccgcagagaaaggcgagaccgtcttgcactccagtccggccttctgcccaacgatcaggcggtcaaagtctgccagaagcagcggatgttcctcgctctggtagatggcatttgcccggcgtactttcagaccggtggcctcggtgaagcgctgcgctacataatcctccaagtcacggccctgccgcatagcctcattatcgatgttctcaatagtttcgctgtttttgtcgcagtaaacctgaaaagcagaacgatagggatttacacccagaatggcacctgcatcggtgccggtaataccgcacttgcggtagcggagccaatcctctttggacaggttcaaagttgaaatcaatcttttcatgcgctttgcatcctttctttcataatagattcggcaagaatgaagtcatattccaccaagtctttcatgatggtggaaaagtcggcagctaacgaatggcaagagccaacccacaggtcataaagaaaatccagaatattattttgtaccctgagatggttccagtagcgctcctccagtctgccctcggattccaaaacaataatggcggtgctgatggtacttttcatcgtgatctcataagccatggtaacgctgatttcagaagcactcttctcaacgttgtcaaaaaattccgtgaattccttgaaaatgcggttatttacatcattcatggcttgctcctttatgctgctgccagcaccatcttgtaggctttgtcgatcatggggttgccctctgcggtgcgcaggaacaggttctcgttgtagtttttggtcttgcggagaggatctgcgtgggtagcaaaatcggagactgcgttgataaagcgccaaccgttcttgccgacccattccagatccggcgcattataatagcgagtcttcagttcttcctgcaggcgcagattattcttccgctggcaatcggacaggtcctcagaaatcgggaaaaactcattgatgaactcctgcaccttgtgatcggataaatcgatgcgagccagctcttcgccacggttgccgagttcaaccatatagttgctggccagctgcagggtttcacgagcatcctgtacgcgaagcagaacattttcggtgtggcgtgcagtccagctgcgctttgcggtattcagcgcaaggttcagagtattctggcagaccacacggatcggagtcatggccactttcacaccagaacttccgtcatgactgttgaagatcacaagatatggtactacctgatctccagcgataagatatttcctcggaagccttgccagcatccagaccttcttgccgccctgcaaggaaccggcagtttcgtaagtgacgccctcacccaacaggtcatcggtgaactgaaatgcttcttcgttctgcacaatgcggtagcggtcggataccacacccagaacagcatcatcagtgctgcggacatttgcgcgatagccgggaatcatagcacccgtgccggaatagatattgcggctctccacctgccaatccagaccggccggttccaaggcttcacggcttgcaggggcatccatgatgatccggccaaggccgtgccaaggggtctcacggacagagaacatcgtttcaacatttgcgggcatagtaaaatctccttttcagtgtattttgctcagtcgttgttttccatttcttcagcgatgcggacgaggacttccaccaggacggtgccaacctctttgacgatttcggaccaaaagttcataatgctttctcctttctgcgcagctgcgctttaaaatacgatggtaataatgatagtgatggtgcggaataacaaaatgctcacctccagacataaaaaagcccctgagtctttcgactcagaggctttgaatcatgattattatatctgggtgaaaaatggaaatttgagaaagctagagataaagatgccagaccggcatgaaggtagctaaaagaaatttggaaaagtggcataatcgctgaaaaattcatcaatcacttgtgcaaagtgtgattgatgaatgagcgatgaaatgatataattaattagaatggaggggaggaaaaacagatgcagaataaaaaaccgccatttacaattacagaaaaaattctcacagatgtaatggagatttgtgaacttgttggaaaagtgagctcaacacaacatctttcatctgaccctgttctgcgtaggcagaatcggattaaaacaatttattcctctcttgcaattgaacaaaatacactatccttagagcaggtaacggctgtactatcaggaaaacgtgtccttgcaccgccaaaagacattgcggaggtgaagaatgcgtatgaaatttacgaccatttgaatgaattgaatccatactcagtggaagacttactgttggctcatcatgtgatgatgcgagggctggttcaagaagatggtgtgtttcgctcaaagccagtaggtgtggttgacagtcatggaaatgtacttcattttggaacactaccgcagtatgtgcctcctctggtggaagaactgctcaaatggacagaggacagcccgcttccgatgctgatcaaaagttgcgtgtttcactatgaatttgaagtaatccatccgtttgcagatggaaatggaagaatcggaaggctttggcatacgctactgctctccagatggaatccgctgtttgcatggcttccggtggagtctattgttcatgatcatcagcaggagtattatgaggctatcaatacatccaatgcccaaggtgaaggaactgcatttattgaatttatgctaagtgtgattgaagaagcatttttgagtgtaatcccagaaaacttcgaaaagagcatgatgcctacaagtggaaaagaaaatcgatggaatattcttgaaaaatacttgaaaaaagagaagattattcataacagtgatgtgcaacagttgctggaagtctcttcagcaacagcaaatcgaattctagtttcttttgtaaaagaaggtaaactagagagagtgagagatggtcgctattgggcgtatcaaaagttataaatgggagttgcataagcaatgcagaatacaaacagagcacaagaaagtggatataaagcttctctgacaagagaacagtttttattccacgaaatgcgaattgtagcgaagcaaatggtgcaaggagaggatcttgcatcaatgatacaaataattgccaccaataatctcttccagtatccaactgaacgcatgacagctggtatggttcgggcgtgttatcggcggctaaatcttttgaatagtgaacaactgcttcggaatattgcagagcattccgtggaagaggcaaaacaaatttgtctttacgcgattatgaaggataatagacttgtctgggattttatggtaacagttattggagaaaaatatcgaaaccaagatttcagctatggaaaacttgacatgacaagtttcttcataagattacaagagcaaaatgatgctatcgcagattggagcgaatctacagtcaaaaagctgaaatcggttctaaatcgaattttaagagaaaatgattatctggatagtataaaagcaggccatttgaacccggtttggctttatccggaattggaaaatgtgattcttacaaatggggatcaggcggtattgcccgcatttaaccgttttgagtgaggaaaatttaatgggtgacatacaaaaacgccttgataacgttcggcagatgattcagagtcaagatttcctagaaggaaaaggtcttagcaatgaagtgaatattcgtatcttctgctatgaaccgagagatgaaatggcagtccggcatttcattgaacagctatcgacagatctgacattggagtgtcagcttcgaatctgcaatttatatcaaatcttcctggaaatctgcgaagacatggatattttggatgctatccctgatatggaagaagaggacggccatgattatctgttggaacagcttcaatcgacaattggagtcgatgaaattgtacagaaaattcagagcgagccgttccagccgggagaagtactggttttgactggcgttggagaagcgtttccatttatgcgaattcatacgttactggaggcatcattgtttgcagagaggccggtgcttgtgttttacccgggaacatttaacgaccagcagctgcggctgttcaactgtctgaagccgaacaattactatcgtgcatttaacgttgtgtgaagggggaaacagagctttggttatacagaatatgtttgtagaagacatcaaccgtaaaattaacggtgttgtcaaggttgacgaggacgagaacaaggtcctggaacaggaactgaacgagtacgttattacacgagagctgaagcggcattttgcagactttttcaatacctatgcagaagcatttgacgaaccaacggcagatacaggagtctggatctccggtttttttggcagcggtaaatctcacttcttgaaaatgttgtcatacttgttggaaaacaaagaggttaatggcattcgtacggtggagcgcttccgcaagaaatttgaggatgaccctggtacctttatgcaggtggatcgtgcaaccaaaggtgaaaccgagacgattctgtttaatatcgattatgaaggctctatcaataaggacaaaacagccgttttacgtgtttttgctaaggtgttctataatcatctgggattctttggcagcaatctcaaagttgctatgctggagcagtacattacgcagcagggcaaaatggatgaattttgccgtctgattgaagaaaagaagggcaaaccttggactgaagtgcggaaagcatttgcatttaatggaaaattcattaagcctgcactggcggaagcattggatatcagtgaagaggatgcaaacaactggtttaacgataagagtgcaacggaactctctgtttcacagcttgtagaagacatcaatgcatacgtcagcacaaaacctgcaaacttccgccttctgttcatggtggacgaggcggggcagtatgttggcacggacacggatatgctgctgaatctgcagtctttggtggaaaaaatcggcagcgaatgcagaggaaaagtctgggtggtctgcaccggacaggaagctattgatgagattatcaaagtacgagcagatgaattttctcgaattcaggctcgtttcaaaactcgtctgagcctttcttcttcttccgtagacgaagtaattcagaagcgtattctgaaaaagactccggaagcagaaagaacgctggatgcggtctatgagaaagaaagctccgggatgcgcaacttgttcagctttacaaatgcaatgccggacatcaagggcttctctggtccggcacaatttgcagaggactttccgttcgttccataccagtttctcatcatgcagaaaatttttgtggagatccgcaaacacggcaatgcaggtaaacacttctccggcggcgagcgttccatgctgagcggatttcaggaagcagcacaaaaagtggaaaagcagaacgagtttgcgttggtgccgctgttccgcttctatgatactgtacattctttcctggatggttccattcgcaatgtgattgatcgctgcagcaaagccgtagaaaatcacgatggtctggagccgatggatgtggatgttctgaagcttctctatctcattcgatatgtcaacgaggacataccggccaatctggacaaccttgtgattttgatggcagacgacatccgtctggaaaaggtcgcgatgcgcgaaaagctgcgcggcagtttggatcgactgattgggcagaattacatcggacgtactggtgatacctacaacttcctgacggatgaagagcaggacatccagaaagaaatcaaccttacacaggtggatacgggcgctattgttggggatatagcaaagattatttttggcataatttatgatgcaaaaaagttccgttacggcaagtgtgacttcccgtttgatcagatggtggataacactatgtacggcatcgccacaggcggcatgcgcctgcgctttttgacggcagcttctgatgcaacggaaaaaacggaatttcgcctgatgaacagctccaaaggcagcgaggcgattgtagttttgggcgatacgccgtattatgaatcgctggaagcatccatgaagatccgcaaatatgtcaaacagcggaatgtcagccagatgcccaagagtgctcaggatattatccgcggccaacaggaagaagcagccaagtatgaagctgaagccagcaaagctctggtagaggctattgaaaacgcaaaattttacgccgatggtgaacatctggacattaagagcggcaatgctaaggccaaaattgaccagacgatggagtatctggtctcgcatgtttacagcaagttggacctgattgggaaaaacgcagataccgatgccgaaattatggcggtgctttctggtgcagatgtcgtttttgcagaagctgaccccaaccgagatgcggaagcagctgtggaagaatatcttgaaatgcaggcaatgaaacatttgcctacctcgatggcggatgtacagagcaagttcagcagtataccctatggctggaaggaaatcgacattgcttatgtggtggcgcgtttgatcgtgaatcagaaggtaaccatcaaatatgcaggcactaccatccagccggacaacgccaaattacctgatatgctccgtaaaaagagtgaggtgggtaaaacatccattagcaagcgcgtggtagtatcggcaaccaaaatgaaggctgtgcgggaccttctgcgggattacttcgatgtcatggatgttcctgcggacgaagacggtttggttaaatttattgccgatgagttcggaaatcagctgcagcattataacaaactgaacgagaagtacgatgatacccacaagtacccggatcagacaatagtgcacaacgctattactgcaacgcaggaagtgttgaaccagaagaaggacaacatcgcgctgatcgactatctgctcaagaaagaggacgacctctttgatcagaaggatgccatgggcaatgtagagaccttcttcaagagtcaggtcggcacctttgatgatgctgcacggctggaacacgagatgcaggcggatctggaccgcattgcgcaggatgcggcggcatacgaggccctgaacaagattcggcttattatcacagtgccatcttttgggcagaagttcaactacaagcgcattccggagctgaatgggttgatgcaaacggtgcgtacagcccatgaccagatgctggatgacaaacgctctgagattctggaaacagtgcgtcagtgcatggaagcgacccataccgctgcaaacggagatcccaaagcattggacatcgtccgcaagtcggatgctttctttgatggctataaggcaaaaattgcaagctgcaagagccttgcgctgctggatggtatgattatcccgctgagccagtacaaggatgagaccgtcagcagcattgagattgcgctggcccctccgacaccgaaaccggtggtaacgaaaaaagatgtcaatatcccggccgtaaagccgaaaaaagtaaagtcttacagccgccaaatcctcttccctgccaagaccctgcgagatgatgcggatattgacgcctatgtggagaagattcgggagcagctgcggaatctgttggacggctgtgatgagattaagttgaactaaaggtgaaattatggacaaaactgaatttccgaaaatttttatttcttattcttggagttctgaagaaaaagttctagagttggccaaaaggctttgttcagacggagttgatgttgttttagacaaatgggatttaaaagagggaaatgataaatatgtttttatggaacagtgtgtgactgacccggaaataaaaaaggttctaattatttgcgataaagtatatgctgaaaaagctaatactcgaaaaggtggggttggtgacgaaacggttatcatatccagtgaggtttacggaaaagcgaaacaagaaaagtttattccaattgttttcgagtcagatgaaaatggaatagcgtataaaccagcatatcttcaatcaagaattcacattgatttatcgacagatgaccttgttaagtatgaggctgaatatgaaaaattattaagagatatccatgataaaccgttgtatagaaaacctcctattggaaaaaagccggactggttagacgaagaaaaaacaagtcttagcccactaacaaatcttattcagcgaatcaaaggagcagttgtattgaaaaaacagcaggatgctgttttaaaatttgcggacacatatattgagacgttaaaaacttttcgattaaaagataatacagatgcaaaagcaatctatgagcagtatattgcaacaaaaggcgctcgtgatttgtttttggattttttgtcggtattgtttgaaacggaacttgacactgtggatgttttgtgtgagatgttcgaaagaatgcataatacgctcacctgcgagtatggatacaactcatctgcatgccaagcaagaagccgtgattatgagatttttcatattttaatttgggagttgtttatttgtacgattgtatatcttaggtatcggaaaaagtatgatgtaatttatggaatggtaagtaacacatactttcttacaaatggttctctagataataatccgaaagctggtaattactgtcaatttcaatattatagccaaattatagaagaagagtataagccgactactgaaaatagaaataaatatacattgttgggtcatacgttatgtaatgaccgggaaaaacttccgatttactccaaagaatcaattgcagaggcagatatttttctttaccaaatttgtaatgcgtatgaattagagcagtctcaaaatcagtggagagatctatattggtttcctcgttgttatgtctatgctcgaaaaggcccagaggagtgggctaaaatgaaatctaggagattctgcaaaaagatatatgatttgtttggggttacgaatcttgaagaattgaagaatgctgtttcgaaatgtacatttgatcctcaaatgaagtattcgggttttgctaatccaataccagcaattttgtcagagatttcactggaagaaattggatcgttgaattaaggagaaccatcatggataaaaacgccatcaagaaatatgcggtctgggcgcggaaagaactgatctcccgcgtggcgcagaaagcccagcagtacggcattacggaaacggaaatggtggacgccggtgctgatagcgtcaacggcaaagtgttgtctgcagaagagatgcagcagcgcagggcactgattgtacagatcaatgaaaagggctaccagcaggtcatggaagaggtggcgtatacatggttcaaccgcttctcggcattgcggttcatggaggtcaacggctatctgcccagccatgtgcgcgtgtttacggatgaaaacaatgcgttcaagccccagattctggccgaagccctgcatctggaattggataagctggataaggacaaggtctacgccctgaaagagaccgagcagaccgaagaactgtacaaatacttgctcatcgtgcaatgcaacgcgctgaacagcattctgcccggaatgttccagaccattgcggactacactgagctgcttctgccggacaacctgctccgggagggcagcgtcattgagcagatgatctcccagatcccggaggacaactggcaggatgccgtccagatcattggctggctgtatcagtactacaacagcgagaaaaaggacgatgtgtttgccgccctcaagaaaaatgtcaagatcaccaaggagaatatcccggcggcgacccagctgtttaccccagactggatcgtgcggtacatggtggaaaacagccttggacgcctgtgggtggagggtcacccggacgcaaaagcacagctgctacccacaccggaggagcaagcagcttatactgccgggaaccgtgacccggaggacaccaagtggcactattatctggaggaagcccagcaggagccgcaggtacaggcccaactgtccgagatcagcaaacagtatgccgacctgaccccggaacagatcaaggtcatcgacccttgctgcggcagcggccatattctggcgtatctgtttgatgtactgatgcagatctacgagaactacggctacacgccccgcgatgctgtggccagcattttgcagaacaacctctatggtctggacattgatgaccgcgctgcgcagctggcatattttgcggtgatgatgaaagctgtccgctatgataagcgctttctgaaacgcaaagatgaagatggagaaccggacgttccgcagcctcatgtgtatgccattgaggagagcaaccgcatcgaaaaaccagatgtggagtatttctgcaacggcaagccggaactgaaagatgctatgcacactatcctcacccagttgtatgatgccaaggagtatggctccatcctcaccatcaccccgcaggactgggatgccctctatgcccggtttgacgaggtggcagacgagtcctcgttccatcgagagagtattcgcaaaaaattactcccattggtgcgggtggcacagacgttggcgcagaaatacgatgtggtcgtcaccaatccgccgtatatgggtgcatctaatatgaactcggatttatctgagtatgtgaaaaaatactacccggacagcaagagcgatctgtttgccgtgtttattgaagtatgctcccgtatggcaaaacagaacggttatcaggcaatgatcacccaacacgcatggatgttcctgtccagctttgaaaaactgcgggagaagatgatgctgactgaaaccgtcagcatggcacatcttggcgcacgagcatttgaagaaatcggcggcgaagtggtgcagacgacctcgtttgtgcgtgtgcggacgcatattgataattttaaaggtgtgtattgccgcctgattgagcctaccacccagcagggcaaggaaggtatgttccttgcctgtgaaaatcgttatattgcaaatcaagataactttgcaaaaattccgggaagtccggtggcgtattggctatcagataaatcaattgctgcgtttgaaaaaggttgtgcacttggaaccttagaaaatgtctgtggagggttgacaacaggcgacaataatagatttttacgcttttggtttgaggtgacattgtcgtcaatttcgtttcaaacaaactcgatggaagaaactgaaaaatcaaactttacatggtatccgatgacaaaaggtggtgagtatcgcaagtggtatggcaataacgaatatgtagtaaattggaaaaacaatggcgaagaaattaaatactgggttacgcataaccctaaagacccaaatacaaagcaatggtctagacgactgtttaacactgaaagctactttaaacatataatcacttggtctggaatctctagtggcgcaccgtctatgcgtgttgcaagtcactcgattttcggtagtggtgctaaggcgattgtatcagaacgaaaagatgacttttatattggataccttaattcttctgtagcactaatgtatttgagagtcttaagtccaacgcttaattatgaatctgggcatattgcctcgctaccaataatcctagcggaagacgaaggaatatcgattgtcgttcaaaaaaatatagatttgtccaagcaggactgggactcctttgaaacctcttgggactttacccgccacccctttatcaaagccattaccaaataccccaacatgatggatattggaaacatttaccttgctgagtgctatgacatctgggctggcgaatgtgaagaacgctttgagaagctgaaagccaacgaggaagaactgaaccgcatttttattgatatttacggcttgcaggatgaactgaccccggaagtagaagataaggatgtgaccgtgcgcaaagcggaccttggccgggatgtgcgctcctttatctcctacgctgtgggctgtatgtttggccgctactctcccacctatgatggtcttgcgtatgcaggcggtacatgggatgatggcaaatacaatatctataagccggatgcagacggtattattcccatctgtgatgacgaatactttgaagatgacatggtgggccgttttgtggagtttgtgcgggtggtatacggtgatagctcgctggaggataatctgcgctttattgcaaacgcactgggcggcaaaggacagccgaaggaggtcgtccgcaactacttcctgaacgatttctatgccgaccactgcaagatttatcagaagcgccccatctactggctgtttgacagcggtaagaaaaatggcttcaagtgcctgatttacctgcaccgctaccagccggataccattgcacgcatccgtaccgattatgtccacgagcagcaggcgcgctaccgtactgccatcgaaggtttggaaaaacaggtggccgctgccaccagcaccagcgagcgtgtcaagctgaccaagcagctgaacaaagtgcaggcgcaggacactgagctgcatcagtatgaggaaaaagttcacgcgctggcggatcagatgattaagattgatctggacgatggtgtgaagcataactatgagatctttaaggacgtgctggcgaagattaagtgataaataataataaacaagaggtgaaattggcgatgaagcagaaagtattaaagggtttaaaaatagtaacacgatggcttgcatgtgcgaaaagcgctttggtacttggtgtaattgttgctttgattacatgggggatgccattggctacgccccaatttgttgctaaagtaaatggacttctttctgcatttgatggaaacacggacgttgtttctttgatgttttcgtcagttatctcttttgtaggaatatttatatcagcactgctggtttatattcaagtttacataaatagatttccgtcagaattggttttgaatcagataaaacctcgatatgccaattttggtacagcgattgccttatatctttttttctgcgttgttgaaatggtagtgaaaatggggcgattctctgatgctgtactatctgtttgtggagtgggtatatttatttggctcttttattttgcatactcgctacactataaaacatctttgacggagtgtacccgtacatatgttaaagacattttgaatacagagagtttgctggaggattctaaagcactaaaagccaaattgaagattcttgaaaaaacatataatgagtgtgtcgctagaaatgaactgtatgtgtgccaaatcatttgtgaggaaagcaataaggttttccttgagtcaatgaaggaaagtcaaacgtcgattattaatggtgatagcaaatcaaaacaaatttccgaggcaatggataatacatttgaacattctatatctcttgcgagagatactgaaatgacagcagatcgaaaaacacagaccactgcagttcgaaacgtggtgtctcagcttacaatgtgcataaaactgggaatgatggatcagtacaaaaaatataccaataggttgatgggcgaattgtattttttgtgcaaaagcgaaaatggggagttacaggatcgatattaccatgcacttatggaaattgttagaataagtgtagaatcaaaaaattcgcaagaatatttgaaatgtactttaacttcaatgaaaagcaatgccaaatattttggatacttatcaaattatgatatgtcggatggatatctttttcttctaggctattgtattgaaaaagatatgggtgaagagtacataaaggattttgtgaattttcttaaatctgcaacagttgtaatgccggattttgaaaagggtaatcgatcaatagaaattgttcggaacacaatatttacagtgctgagaagaaatagaaaagcagagatatatattgttattgattcgttagacttaataagacaatttgccataaaaagcgaaaaatggacgattctagcaattcaaatttttgtagaattcgaaaatgaaaattttaaggattattttgaaatttcgtttgaaaagcatgtgaatttgttgacttcaatccaagagtcatactctgataaatttttgaggacacttcctcatccgaatttcaaacgtttcttaggtgaaagcgaaaaccgcatagaaagggttcagattctcaaagattcgttcattcaactgatgagagaagcttatagattagatatggcacggatgagttatcagcttttttatgaattgcaagattgtattacagatgaaaatataaccgaagcaacacgagaaagcttgatggaaatatatttcattgtgatagagcaaagcttaatgtccactcatgaggatcttaatatcttgatgctttcttggatgcaggaagcgattgagatacttgatcggaagaaattgatgtctgaaaaccttggagaagaaattataaacattataattgataaaattacgcagactggtatgaatgaggacgtgcgagaatatttattgggaatgatatcagggtggtctattcgattcgaaaaaggtaatccacaaaattttgttttgataaataaacaaataagagttcttttaataaatggcttacacagcgttggtcttttttcgctggaaacattaaacattgcactactgaaaaatatttccaatgatttgggatggatgttaattaatgcactccaacaagactatcccgaggtacaactattacttgatagtgtaatcgacctttaccgaaaatctgtgatttttggtgtggcgtttaatgttagaatttatttgctaacgttattcacgacagtaggtgcattttgccaaacggacagtaaatataatcctactggagatgctgtgatttcttttttgaaggaaataccacatgatatgattgatctcgctatcgatgttagaaaaaatgattatgatggatgggataacgatgaattcggaaatataaaaaatggagtagcaatactaaaaggcaaactggcaacctaaaaacacaggggcatttgtagacaattaaaaaggatgatatgttgtggaaacagataaaatcgtattagacctcaaccgccggtttgcggtaccgctgccggaattttatgagcgccggatcatcttctggcacgatgaagaaaaggagtatgcggacaagctggatgagatccggcttgaaaatgctaagctggttgcactgaccggcagtaatacctttgcggtcaaaaaaatgctgtcggtggatgacctgacgagcaactatgttgtctactgtcccatttcctacgagcggcaggaggatgactggctgttggatattgaactatacagcgaaagctaccggacggatgctgtttccaactggatgcaggaactggatatcttggacaatccctctatgcgcaagctggtgaagcactaccggaagttttttggtgcacaggctcgtcgtgccaaaatcatggcacaggataagatacctgccactccggcacagctgcacatggccgtgatggcggcgctctgcggtatgaaaaaagcacagcccaatgaaatcttgctgaacgtgcttcgtggtggactggataaagcgcagaatccaatctatcagagttttgtggattatagtgcagaagaagctttctgggcaatggttcggcagggctgtggctatgcagaggaagagccggatcttgggcagctggcaattcatcttctgttgacagcttctacgcgcacactgcgcccggaatttctggcagggcttgagaagtttctttccattccgcatcaggcgtactgctacgagctggtgtcggagtggctgcacagtgatgatttgcagcagctttatgacgtggcccgctatgtggaagatgaagcacatctgccgcagaggctggaaaaactaacggttgatgatctggcgacaacggagtgtttcccgtgcatcaacgagatcatcctgagcaagctgatgacggagatcagtgaccatatcattgatgtggatgtgatcacaaagacggtggaaaaacgtcgcacctgtgtctggtacgagtacttccgcaatttctacgagggtctgttgcaagtggccaacatgcaggagttcttcaaagagcactccgcagggttccataccccggacgcaaagcaggtctggaaagaatatgcggaggactattacaggatggacacctattatcgactgttccatctgagcttccagagaagtctggaaacctccaatatcaaactggacgacctgttcaagcatgttgtagataaggtagaggggctgtactcctactggtttctgggaggcctcggcaaaaactggtcggatgtgtgtgctgatgagatggcagagcatggccgcgtattggaaattccgcagcagtcggatttctacaatgagcacatccgtccggcagacagccgcgtgttcgtgatcatctcggatgctatgcgctacgaggtggcggcatcactggcagatgaactgcgcagagaaacgcagagcaatgtgaaactcggcagtatgcagggcatattcccgtctatcacgaaatttggcatggcggcactgctcccacataaggcgttgacggctgaactgaaaaatgaggtactgaatgttttggccgatgggcagtctaccgcaagcacgaaccgggataaggtcctgaaaggtgtaaatccggccagcgtggcgttgcagtataagaacatcatcgggatgaaacgtgcagagcgtgcggcactggtcaagggtatggatgtagtctatatctaccatgataccattgacgaagcaagccatacttcggacacctctgtgttcccggcatgcgatagggctatcagtgaactgaagaatatggtgcgcattatcgtcaatgacttcggcggggcgaacattctgattacggcagatcatggcttcctgtacacttatagtccgctgaccgaagatgacaaagtggataaaaccagcttccatgatatggaagtggaatatggcagacgctatgcaatcatgcagaaggaggcggatccgcagtatttgcttcctgtaaaattcctggacggaaaaacggaatacactgggtttgctccacgggaaggtattcgcatcaagatgaatggtggcgggctgaattttgtgcatggcggtatcagcctgcaggaaatgacggttccggtgatcgaatatcattatctgcgcaacggctctatggaatatcggcgcaataagcagaagtatgatacgctccccgtaacagtgagtttgctttcttccagtcggaagatcagcaatatgatcttttcactggatttctaccagaaagatgcggtaagtgcaaaccgtgaggctgctacttatctggtgtggtttacggatgaatacggaaagcctgtcagcgatacccagaagattattgcggacaaaaccagtgagaacggcgcagatcgtacgttccattgcaacttcaacctcaaatcgatgaagttcagcaatacagcaacctattatctggtgattgcggatgagcagggtcagcagatgcagcagcgggaacagttccagatcgatattgcatttgcgattgatgaattcgatttttttaactgatgggagcaggaggactataaatggagccgaatgcggaaaatagctgccgtcgagacgcaatcaagaaaaaattacggcagaattttgatggaaaaatcgttcgcaaggatctgactaaaaagatcaaggaaggtgcgaatgtcccggcttatgtgctggagtttttattaggccagtactgtagttcagatgacgaagctattattgaaaaaggtgtgcagaatgtaaagcacattctggcggacaactttgtccgaccggatgaagcacaaaagattctttcgcagctgcggaaaaagggcagccacaccattatcgatatggtgaccgtgcatctggatatcaagaaagactgcttctttgcagagttttccaatctggggctctccaatgtgcccattacggacgactacccggaaaaatatgaccgtttgctctgcggcggcatctggtgcatcgttcaactggaatatgaatccgaaggtgacagcagctttggcatggaagatcttgacagcgaaccccggcagaaaaagcagaaggatgtttcgcctatcagcatccgcaagctgacccccatccagatgccccatatcgacattgaggaagtgcgcgctggacgtaaagccttcacgcaggacgagtggatggatgtaatgctgcgttcttgcggttatgagccggagcagttgaaccagcgggagaaatggctccttttggctcgtatgctgccgctggtggagaacaacttcaacctctgcgagcttggtcctcgcagcaccggtaaatcccacatctataaggaaatcagccctaacagcattctggtgtccggtggacaaacgactgtggcaaacctgttctacaacatgggacgaaagactgttggtttagtgggtctgtgggactgcgtggcttttgatgaggttgctggtatcaagttcaaggataaagacggcatccagatcatgaaggactatatggcttccggttcctttgcccgtggcaaagaggaaaaggcagcctcggcctcgatggtctttgtgggaaatattaaccagagtgtggatgtgttgctaaaaacctccagcttgtttgacccgttcccgcctgaaatgggaacagacactgcatttttggatcgcttgcattgttacattcccggctgggagattccaaaattccgcccggagcatttcaccaacgactacggcttcatcacggattatcttgctgagtttatccgggaactgcgtaaggagcagtacggcgatgcactagataagtatttccgccttggtaaaaatctgaatcagcgtgatacgattgcagtgcgtaagattgtaggcggctatgtaaagctgctgtacccggacggtgagtttaccaaagagcaactggaggaaatccttgtctttgcgctggaaatgcgccgtcgagtgaaagagcaactgaaaaagctgggtggcatggagttctatgatgtgaatttcagctacattgatctggatacctttgaagaaaagtttgtgtcggttcccgagcagggtggcggtaagctgatcccggatggaatgtgcaatccgggacagatctacactgtttcgcgtggaaaaagcggcatgatcggtgtgttccggttggaaagccagatgttgccgggcagcggaaagtttgagcgcaccggtcttggcagtgaccgtgattgcagagaatccaccaacacggctttcaacttcctgaaagccaacggaaaccgcattagcggcggcatcagcacggcatctaaggactacatcatcaactatcaggatcttcagggcatcggtatgacaggaaagctggcactgcccaccttgattgcattgtgcagcattgctcttggtcgtcccacggtcagtacccttgcagttctgggcgagatcagcatcagtggaacaattttgaaggtagatgagcttgcaaacagcctgcaggtctgcctcgatagcggtgcaaagaaggttctgctgccgatttcaagtgccgttgatctggggactgttccaccggaattggtgggtagcttcaatctgatcttctacagcagcgcagaggatgcggtgtttaaagcacttggtgtggagtgaagaaaggcgtgctctatgaaaacgaatgatagaaaaatcacagacctgatggccacaatccatacaggaaaaacgcaacttcctgattttcaaagaggctgggtatgggatgatggtaggataaaagcactgattgcaagtattacaaatggttatcctgtcggtgcagcaatgtttctggaatacggtaatgagagtattcacttcaaatcacgagttgttgaaggggcgccttctgcagacaaggtgatacctgatgaacttattctggatggacaacaaagactgacatctgtctattcttcactttttagcgagaaagcagttagaacaagaacagacaaagggcaagaaatagaacgcttttactatattgatatggtcaaagctgttaacagcacggttgaccgggtggattcgattatttcggttcctaaggatcggaaaataacttcagattttggtcgaaaggttgagctggatctttcgtcggcatctcaggaatacgctcagaacgtgttcccgctaaacattattcttgatccgagcaaatacagcaagtggcaaatggactatatgcaatatcatcagtacgattcaaatgctgcaaaattatatatggactttctctccaaagtaattgttccgttggggcagtatacgattccagtgattacattggacaaggatacccccaaggaggcggtttgtcaggtcttcgaaaatgtcaatacaggtggggtgtcgcttactgtatttgagctggttactgccatttttgcaatggataattttgaactacgcaaggattgggaagaaagacagaaaaaatatttcagtgacgacattctttcggtgacctctgcaacggatttcctgacggcttgtactctgttatcttcgtataaaaaaggcgggaccgtgagttgcaaaaagaaagatgtgctgaatctgacgctggcggaataccagcggtatgcagatgatttgacggaaggatttgtggaagcggaaaaaatattacaggaagaacggatcttttctagtaaagacctgccatatacgacgcagttgattccgcttgcagttctttgcacgttgctggcagaccataaccgcatcaaaacaacgagcgtaaaagataaaataaagcaatggtattggtgcggtgtctttggcgaaatgtatggaagcgcaaatgaaacacgctatgtgtacgatgtggtgggagtaatggcgtggttggaagatgcgtgtaaaactcctaaaacggtgcaggaattttattttaatccggtgcgcttgctatccttgcaatcaagattgagtgccgcctataaaggcattatggcacggatcttgaagaatcagtgcaaagattttatcagtggtcgtgaaatggactttacggtttataaagcagagagcatagatattcaccatatatttccacgagattattgtgagaaaaaaggtctgccgcgtgcaaaatggaattctgttgtgaataagacacctattacatattctacaaaccgtgaaattggcggagtagcaccaagccaatatctgaccaagattgagaagaaaggtcaagtagaaccagatatactggatggctatcttaagacacatttgatcgatacgggcgatatccgcgcggatcggtttgatgatttcttcatcaagcgttcaactgctattttgaatgagattgaaaaagcgactggcaaatcgatttccggtcgtgacagtgatctcgtaattcaggactttggtggagcactactataatctgtgagaataaagcatgtctgaatttaggaggccaccatggagccaatgaaagcaaccagtgtcaatagccgtgcagaggagctgtttgtacagcttttctgtgaggcttttgggcctgagaaaaccgaaaatttgcaggtccagtacccctgcgtggacatctatggtcggcaccgctatatcgattttgcgctggaatcgcctgaatccaaaattgcaatcgagattgacggtgagacctaccacaaccctagcaaggtgtccgaaaataaatacgctgatgacctcctgaagcagaacagcctgatctatgacaactggaaagtataccgttggatttacagccagttggaaaagcaaccggaaaaggtcaaggacgagctgattacatttctgggcaccagccccatgttcaaggcatttgaagcagacctgccggtgcagatgggacagaccatcgagcttcgggactaccagcaggaagccaccgagaacctgcagaagatgcgtgaggacggcaagaccattgcgctgctgtaccatgcgaccggcgttggaaaaaccatcacggcagcaacggatgccaaggcagtgggcggacgcacactatttctggtcaacgccctgaagctggcgtcgcaggcaaaagagactttcgccaaggtctggccggaagcaagcttgggagagtacaccggaagccagaaggatatgacccagacggtcatttttgcaacggtacagagcatttccaaagacctggaaaagttctcgcctacagattttgactacttgatcgtggacgaatgtcaccatgcagcagccaacacctaccagaagattttcacctacttccacccgaagttcattctggggctgaccgccactccggaacgcagcgatggtgaagatatgctggagctgttccagaacgttgcccacaaaatggatcttaaaactgctgtggagcgtggcgtactggtgccgattcgctgcatccgggtcaagaccaacatcgacctgaccgatgtgcggatcaacggcatcaaatacaattcgcaggatctggaaagcaagctgttcatcccggaacgcaatcagttgatcgttgacacctatctaaagtacgtcaacggcaaaaagaccgtgatcttctgtgccagcgtagaccatgcagccgaaattgcaaagttgctgcgggacaacggtgtgaaggcggaagcagtttccgggcgggatcgtgttgaggttcgggaaaaaatcctgaaggactatgaaaccggctcgaccaatgttctttgtgcctgcgaccttctgaatgaaggctgggacagcccgcataccacggtgctgttcatggcacgcccgaccatgtccaaaacgatctatctacagcagcttggtcgtggtacacgccgctgcccgggaaaagaagacctgctggtggttgactttgtggacaacgctaatatgttcaatatgccctacagcctgcaccgggtgctggacattgcaaaatatcagcccatggcgtatgtgctggcgccggagaacaagcgcaagctggatcaggatatgttgttccagggtgaaaagcccgaagcatggttggatgtgccgatcgatgtgtctgactatgagatcatcgaccttttcaactggcagaacagcgtcaaggatatgatctcgcagattgagttcgtccggatggtggatatacagtccgagacggtggaacgctacattaaggacggaaaagtcaaaccggacctttcgattccctttggtgataagcggatgttccactatttccgggaggaaagcatccgcaacattgcgaaacagtatggctgggatctcattacaccgcagaatatggcggacaagttcatgaagttcatcgaaacgatggacatgagctactcctacaagccggtgctgctcaaagctatctatgagtacatggacaccagcggcagagttgccctgccggatgtggtggactacttcatcgacttctacgaggaccgcaaggcgcacgggatgattgcagagaaatccaccagcatttatcagaagggtggttatacccggaaggatgtggagaagaacatcctctccaaccccttcaagcgcttcgaagatatgcgattcctgatgcgctgcaaggatgtggagactatcgaggtaaacccgatcatcttccgcaagctcacacgggaagattggctgcatattgtggatgtctgtgataagagccttgaaaaatactatttgcggataaaaaagtaagtagaagagacgcttatcgtatatcttgttttgtaaaattagacagggcaacagaaaaagccctgataatggacaaggcaaggaaaggctggatgaaatggatctgacaggaaagcgtgtgcatcatcgaagctttggtgatggagttattacagagcaaaagaaaactacgatcgttgtgacctttcgtgatggagctaaaatgtttagctatcctggttgctttcagacgtatctcaaaattttggatactgacctgaaagaagatgttcaggaagtggtaagccaacacgaacacgctgagacggctgagagaaaacagcgaatcaatgaacttcaaacgtcgatttcgtcaaaccgtcgtcaggaaaaagacaaaagtgttcagataaaaccgtttgcctccgtggctgatttttgtcaggcgtacaggatggctttaagcgcagaaatctccttcattcgaatgacaggtggaaagcatatccttcttcaggaaggtaagcgaatcggacgagacaacgggcaatttgtgtaccttcttgaatcggaagatgagcttaattatcctgaaggaacgccagttacaatttggaagggacaatcgcaaatttccggtaagatcctgaattgtgaagcgttttcagtctatctgatcagtgaacttgatttgggcgcagaggttgaaatgctgaatatttctgcggaggcttgctatttgctccaatctgtatcggagcgccttatggatctgtctcttgaaccatcggaaattgcacaggacctaatctgtaatgggttgaaagagatcgactatcgcaattcggatattgccaaggggcaggagacagcggtaagaatgtcactggagcaaccgataacatttgtttggggacctccgggaacaggaaagactcaaacgcttgcaaaaattgcgtgggctcacattgacaagggcgaacgtgttcttatgttgtcctacagcaacgtttccgttgatggtgcaattcttcgtgtgacgtcgttgaaaaatgacgttttccccggacagctcgtccggtatggttttccgaaggataagaggatatcagagcatccctatctctcctcatacaatttagcaatcaataattatccggatctgctaaaaaggagaacgcagcttcaagcggaaaagaagcgcttggagaaaaatgatccaaaactgattcaggtggagaaagaactcaacgagattcgacgggaactcagagcagcggaaagtcagtgcgtgaggaatgcgaaatttgtagcgacgacggtttcaaaggccattgttgataaggaaattcgtaatggtgcttttgacgttgtgatttttgatgaagcaagtatggcaacgataccccagatagcatatgctgctaaacttgcacgaaagaattttgtctgcatgggcgatttccgacagcttccgcctattgtccagagtagcaaagagtcaccactgaatgcggatatttttcagtattgcggaatcacacaggcggtagatcaaggcagcaatcacaaatggctgtgcctcttggatacgcagtatcgtatgcatccggaaattgcggattttgcgggcagatctatatacaatggtttgctgaaatctgcgaacagaatgaccgaaaaacgagaaaaaactgtgatggcagagccattcgcgggacgtgcaatggagtttgttgatctgagtggaacaatgtcaacctgtattaaaagcagcgacgactctcatgcaaacgttctgagcgcatttgtgacattttcgctggcgttaaaggcagcacagacgcaggaagttggtattattactccttatcatgcacaatcacggcttctacatgcaatggtgcgtgacgtcaatgagctggaagcgcttccgcatgccataaaatgtgcgacggtacatcagttccaaggttctgaagaggacgttattgtatacgatgcagttgactgctatcgacttcctttcccgggggcattgatcgcatcaactgctggacgttatgctgacagactttttaacgttgccatgacgcgatcaaaggggaagtttatttgcgtagcaaatggatcgttcatgagaaataaaggaatgtcagaaaatctgatgttcatgcaaatgctgaaaagctatcgcgcgacagctcccatgattccggaaataattcgcccgaatgacgaccttgaaaaatactattttgattttgtggaaaaagaaaatcaagtggatgaattcattaaggatttggctactgcaaggcgtgaggtccggattgacattccggattctccggcaaactcggatataaataccactagaattgcacaggctcttgcagaagctcaaagccgtggagtaaaagtatttgttcgagccgaatcgaagaagaacctccatccgacgttaaagtattttgcggtagaaaatcactatctgacagatccgattgcattaatcgacaagactgtaacatggtttggcatgccagaatctgcagcgtgcttcaaaatagaaggtaggacaagcgctattaacaatcgtccatgtattcgtttttggggaacgcacacagcaaagatcctttacggattactggaaatgagtcaggtgatggatcaagccaaaaccgttgaaaaggatgcacagggaaacttgataacggataagttatcggattatgttcttgcacacaaaaagtgccctgtctgcggaaaacctatgcagctgaaaaagtccagaaatcaaaagtattttttgagctgttctggctatccgtcctgcaagcatacagaatttgtcgaaacggaattcgtagaagagtatttttatcataagggcaataaaaacggaatgctttgccccagatgcggctgctctctcgaagccaagataagtcgatatggcatttatgtgcaatgctgtggagggaaaagacacaagtatggcttggatgaaatctaatgattgagctaaagctcgggaacagacaaagataatcgggtaaaaaagctcttggcctctatattaaggatcaagagcttttttacatcttgttttggaacataaaagaaggtacaatagtagaaaagagaacgtgcatcagtcaaataaggtggtggaggcgatgggcaaggcaacagtctactgcattatgcacacggaaagatgtgtggcacaggtgagtacggctggtgagtgtaaaatttattttgaagatttcatgccctatggtctagtgctgaaagaatcgaatgattttgatactcgaatcaataatgtgattagcttccattcatggtgtgtatctcggctgataccacgtgaccgcacttatgcaaaggaaatcctgaacagcattggcgcatcccagagtgttacggatcgggaacgtgcacagattgcgctttcgtaccattgcctgtctctgctggatgtgttctgggtaaaagaagaaaaagagactgtccgatttgaggatatcaatctctacacacactctttaagcaatgctcttgtggatattgcactgcgtgggcatcagatggctgtgacaaatgcccatcttttggcaaatgatttgtccactggcggatgctatcctaaagcgtgggtgcgcaaagaggaaggcttctatctttataaagacggtggacaagatgcagtcgagcgtgaagtgctggcaagtaaaatctgccgatgctttgactgtcatcaggttctgtatgagcagggaatgtttgagaacgagccggtttccatcagcaaaattatgacctcgcagcgatatagccttgtgacgtatgcagcctatgatgtctactgcacaaaccatgattggaacacgctggataagattttagagttggacgcccacggatactatatgatgaacattctggattatctggtgggcaacaccgaccgccattgggaaaactggggtctgttgatggacgatgagacgaatcaacctatccggctgcatgatttgatggatttcaaccgggcgtttcagcaatatgatacattggatggagcaaactgcctgaccgttggaaaacggcatttgagccagagagaagcggcgatagaggcggtgaaaaaaattggactgaatcaaatatgtgaaattgaaagcaggatattaggaaaaaataagcaacagaaagtaatatttgaacaaagaaaaaagataatggaaggatgtagatgaatggatcttaattcaacgttgttttataaggcaaagttcgatatagaagccatctatccagacacagatttgctatggaaacttgtatgcgaaattcgcaattggatgggaaagaaatgggaaaagagaggtgaaaccatcacagatgattcacattgctggacgacatttaaatttggccgagagttttcatcaaagaaagaatccgtccatttcagatctgtttatcatcatggaaaagacggctcaaccgattgggcatgtaaaattgtagaaagctatccatcgaaaaatggatgtgctccaagagaatggacgacggaaataggatttcagcaggttaatactcagcgggcgacaataagcctagtattgtattataatgatagacctggttttattggaccatgtgaagataatccgccagcatcaataccaggtatcgtgtggagattatgcactggaagaggaataagatgtttggttgacaataaaagattttccatgaaagcaggtcatttgaatccaggggattttcctgaattttggaaaatcatttgtaacgaatatcgagaggttccggttgtatatataagccctaaaagagtggatgagagtgataatggggaaaatttggttgatccacagaaactggttgaaaaattagggccgaatgcattggtttactatgctaatgatatggatttctgcagggaaatgacattgctgtgtaaaccagaaaaatttggttgctatagtggtaatgtcagaatttatcttccccatccacatgttgatgatgttgcagatagctataggcatagaatgatctatgctagggatattgtcgataatgaagaagatatatatggaatgttgaggcgtgcacttgctcaagatgttcatttctacgaagacatgtttagagtagaagactgtaaaaagctgaacgaaagggatttggcggaaataaggaggaatgaatatcgccaaaagattgaagatgaattgttagaaatcaatgcagagagcgatgcaaaaagacaaaacatcttaaaagaagaactggaaaaaattgaaaatgaacgttatgagtgggagcgcgcgagagaagaatatgaagataatattaagagtttaaaagaaaaaaatcatcgtttgcaaatacaggaaagcaatcgtcaacaggaggtacaagcggaaacaagaaatatgatggaaaagataagagagtttcctcgatatccgaaaacctcagaagagattgcggactatttcgaaagacattttccggatagggtggtatttacaaaacgggggaaggcttctttgcaggaatgtacaactgcaccagaaattctttgggatgcactataccaaatggtaacaaagttatatgatttatatgctgacaaagaagttaaatccgtagaaaacgctttcaatagtatttccagtttacatatggcgcgtggtgaggggatgatgacaagaaaagattcaactttaatgcgtcaatatgaagatgactacaacggaaaaattataagtatcgaacctcatataaagactgctgaaaccaaggaaagcagtccgaggtttctgagggtatactttgggtttgatgaagaaagtaaaaaaattgtgattggttcctgtggaaagcacttgaataactataccacaagaaaaatctgaaattgccgtttgtagcagatctgtagcaaattgcttcgatttaacgaatcatcgttctaaaaaacgaaaagtcatcatgcatcacacgcagggggtcttggattcgggtgtttttgctcccgggatgtttgcctttgcgcaacagtccgggaaacaggcaaagacaggaaaaccgcgcagatcacgttcaataaacaaagaaatggctgctgcaccgggaagaaaccctgtgcagcagccatttttattatggtataagatcagtccttcttctcggcggtacgggcaaagaagttggcgaggacggcgccggaaatgttatgccacaccgagaacacagcgccggggatggttgccagcggatactgtgcaaagtgggcagcggccagcgaggtggccagaccggagttctgcataccgacctcgatggagatcgcgcggcacttggtggaatccagcttcagcagtttgcccacgccaaagccggtgaggtagcccagcaggttgtgcaggatgactacggcaaggatcagcaggccgctggtcatgatcttggcggagtttgcagaaacaacagcgcagatgatgagcacgatggcggtggtggagaccagcggcagcacgcggacggcgttctgagtgaaggcgtggaagaagtggttgaccacaaagcccagtgcgatgggcaccagcactactttgacgatggacaggaacatatttacagggttcacatccacgcgctggccggcatacagcagggtgagcaggggagtcaggatgggtgccagcacggtggaaacggcagtcataccaacggacagtgcaacgtcgcccttggacagataggtcatcacgttagaggaggtgccgccggggcaggtacccacaaggatgacgccgatagccagctcggtgggcaggtggaacagctgcgtcagcgcccatgcaaggaagggcatcagggtgaactgcgcaatgcagccgatgatcacatccttcgggcggctgaacaccaccttgaagtcctccggcttcagggtgagacccatgccgaacatgacgatgcccagcagggtgttgacccatgcggtctttactacactgaaggtgccggggaacagcagagacagtgccgccaccacaatgacgatggcggccatgtacttgcccacaaagtcgcttactttttccaatgttttcatgataaactctcctttttcctgaacacttatttttgcggatgtaaaggcaatgaaacatccgggaaatggctttcccgcaaacaaaaacgcctttgccccttacggttcgtaagagacaaaggcgtataaactcctctgcggtaccactcttattgccggtgcaaagcccggcccctcagtgcgcatccaacaatgcgcggcccgtgataacgggggcctgccgttcccgcttactggggcggatccaccgcccattcagccggaaagctcggagaggatcttcccacggacgccctgcactgccttgcaccaaaccggcagctctctgcagcattctttccgggtactctttctcgtcatagccgaatatttcactgccacggagtatactcccccggggggctgaagtcaagggatatgacccgtctgttttttcatctggttcatatcatgaatgaaagcggctcatgtgatggctgccccggccagcttttgccgggcgtggatcctttataaaaaggtgaagtgaccgctggccacttcacctttttgtgtctcgtgtatttttgctgttacaggatgcgcacccggatgacggcggggatgctgctcagcttctcgctcaggcgggcatccacggcaccggtggcgtccagcatggtgtaggccatgttctttttgctcttgttcaccatgttttcgatgttcagacccgcttcggtggtcagggcagtgatctggctgatcatgcccggttcgttcttatggatgatgcagatgcgcttgccgccggcgcggggctggtgcacctccggcaggttgaccgagtgggtaatgttgccgttgcgcaggtaatcgctcagctcctgtgctgccatgatggcgcagttgtcctcggcttccggggtggaagcgccaaggtgcggggtgcacacgatgccgggacgacccagaatggcttcggagggaaagtcggtcatgtagccggacaccttgccgttgtccatggcttccagcagggcggcggtgttcaccagctcgccgcgggcgtagttcaggatcttgacgccgtccttgcacagggcgagggtctgggcgttgatggtgtccttggtggtgggcaggtaaggcacatggatggtgatgtagtcgcacaggggcagcatatcgttcaggtttacgcagtggtgcacctgactgctcaggttccatgctgcttcaatggagatgtaggggtcgtagccgtagacctccatgcccagctcgatggcgcagtttgccacccgggagccgatggcacccagaccgatgacgccaagggtcttgcccttgatctcgttgcccacgaactgctttttgcccttttctacgctcttggacatggccgggtcaccggccagaccctgacaccactgggcggcggcggccacgttgcggctgcccgcgatgagcatgccgatgaccagctctgccacggcgttggcgttggcacccggggtgttgaacaccacgatgccctgctcgctgcagcgatccagcgggatattgttcacgcccgcaccggcgcgggcgatagccagcagattgtcgttgaaggtggtgttcaaaaggtcggcgctgcgcaccagaataccgtccggggcgtcggcatccaccgtgacatcgaactggttcttgggcagctttgccagccccaccgggctgatggcgttgagcgttttgatggtgtacatatctgaaacccctctttatgcattctctttgcggaacttctccatgaagtccaccagcttgtccacgccctcggcaggcatggcgttatagatggaagcgcgcataccgcctaccagacggtgacccttcaggttcacaaagcccgcctcggcggcttcggcgcagaactttttgtccatgtccgggttggggctggtgaaggtgacgttcatggtgctgcggtagcggtgctccacagggttcgtgaagaactcctgcccgtccagataatcgtacagcaccttggccttggcttcgttgatcttttgcatattggccagaccgccgatgtcgttttccagatacttgagcaccagaccggtcatgtagatgcaccagcacggcggggtgttgtacatgctgtccttcgccagcagggtggtgtagttcatcatggtgggcacgttatctgcggcgtgacccagcaggtcatcccggatgatggcaatggccataccggcgggggctacgttcttctgcacgccaaagtagatgcagccgtacttgctgacgtccacgggcttggaaaggatcatggagctcatatctgccaccagcggcacgccctccacctgcggcagctccacatactgggtgccgaagatggtgttgttctggcagatgtggatgtagctggcgtccttgtcgtagtcgatagcgtttacatccgggatataagtgaagtttttgtccttgctggacgccacgatcttggcttcaccaaacttggcggcctccttggcagccagacccgagaagttgccggacacgatgtagtctgccttgccggtggtcataaagttcagcggcaccatggcgaactgctgggtagcaccgccctgaaagaagcccaccttgtagttgtcgggaatgttcatcacccggcgcagggaagcctcggtgtccttgatgatggcatcgaaccacttgctgcggtggctcatctccatgacgctctgaccgctgtcgccgtattccagcagctcggcctgtgcctgccgcagcaccttttcgggcagcatgctggggcctgcgctgaagttatatactcgtgccataatgaacctctccttttcctgtggtatacctatcacgcagcaccgccgttttgcggtgcgtctgttactttctgtagccgtagtataccggtttttccatgccgaaaacaagagcatctttgcacaaagatatggcccctgccccccgcctgagggcacaaagcatacaaatgtacgccgtgcggagacaaaatataagacaaatgtaaaagacatgtgctatcccttggtttcatgcggattttccgcccttgcacctttggcagaaatgcggtatactggaaatactaagacaaatgtaaaagaaaaacgaagcccaaactgtgaaagtgcgtttggagcggcccgcagagcttgtcggggcaaagcccctccatctgctaacgcagaccgctctgccgcttaaaagccccactggggctttcattgctacgctgcgctccgcaaacgcggtcactccaaacgcgaaataaaatagtcattccgctgaaaatggtcagagcgaagcggagaccattctaaatcgccccaccgcaaaaaacggtgactaaggggaattgaatcattcaaggaggtacaacagatgtacggcttaccagataccctgcggccgctttcggcggcggaagaacaggtgatgcttgcggtgtgggcgtgcccgggcgcggcggcgcggcgggacatcagccagaagctcaaggccaccggctgggcagcagccacggtgctgaactttctctaccggttggaggaaaaaggctgggtcaggtcggcaaaacagggcaactgcaacgtgtatgtgccgctggtcacccggcgggcttacggcgtgtactgtatgcggcagcggctggataccctgtttgacggcgaccttgccgccgccgtccatgcgctggtaagcgagagcggctgctcccagagcgccttggagcaggccatccgggtgttggaggagaagcatcaggagaccgaggagtacgatttgtacgacccctacggctgaattgtttcatatttttttacaaaatgttggttgacagcgaaatatccgttctgtaatataaaagctattaaaaaatgagaaactgatatggacgaacaggaaaggagcagtcagacacatggatcatttgcagaatgtattaagctacttcgaccagcagcagcccctttgcgcagagcatgaccgcatccccaaggacctctaccgggagttcggggtcaaggccggtttacgcgacgagaccggcaagggcgtactggcaggtctgaccaacatctcggacatccgggcgttccagtatgtggacggggtcaagcacccggcagacggtcagctgctgtaccgcggctatgacgtaaaagacctcatcaacggcagccgcggcagccgctttgcctttgaggaggcgggatatctgttgctgtttggtcagctgcccaccccggagcagctggaacagttctgcgcggtgctgggcgagtgccgcaccatgcccaccaactttacccgcgatgtcattatgaaggcacccagccacgatatcatgaacagcatggcgcgcagcgtgctgacgctggcttcctacgaccccaaggcggcagatttggacaccgccaacgtgctgcgccagagcatccagctggcgggcatcttccccatgctggcggtatacagctaccacgcctataatcactacgaaaaagacgccagtatgtatatccaccgcccggaccccagcctttccaccgcagagaattttttgcggatgctgcgcccggatatgcagtacaccccgctggaagcccgcgtactggacgtggcgctgctgctgcacgccgagcacggcggcggcaacaactccacctttaccacccgcgtggtcacctcctccggcaccgacacctactcggccatggcggcggcgctgtgctccctcaagggcccgcgccacggcggtgcaaacctgatggtcatgcacatgatgcagaacatccgggacaacctccacgaccttgaggacgacgaggagctggaagcctacctgaaaaagctgctccacggtgaggcctttgaccgcaagggtctgatctatggtatgggtcacgccgtctactccctcagcgacccgcgcgaggtggtgttcaagggctatgtggagcagcttgcccacgaaaagggacgggataaggatctttccctctatacccgtatcgagcgcatggcaccgcagctgatcgcgcaggagcgcaagatcttcaagggcgtcagccccaacgtggacttttacagcggctttgtgtacgagatgctgggcatccccatggagctgtacaccccgctgtttgccgtggcgcgcgtcatgggctggagcgcccaccgcatcgaggagctgctcagcgccaacaagatcatccgcccggcctacaagagccttggcggcacccacgattatatcccgcgcagccagcgggcataaagggagggcatcagcatggaagagttacagcagcatcagggggaatggttcttcctccacgagctcaacgtggataaggtgttcagcaccatccagcgggcagattatctcatcctgtattatatcaaggtagagcaggaggcacatcccggcgaaaagctctatcttgccgaccttgccgccgccatggggctgcgggtgaccgagctttccaagggcatcgagaagctgcaggacagcggctttgtgacgtggaaaaccgaccgcgaggccgggcgcacctatgtggaactttccagcaaggcggtggagctgatggcggaggagcaggcgcttttgcagcgctgctaccgccggatgcgcacggagcttggagacgaagagctgcgccgcgccgctgccaccatgcagcgtgccactgccatcctgaaagaagagcgggagaaggagttcccggcagcgcagtaacgattatgaaagaaagataccggacagctttgtaggccgcccggtatctttctttttataaaaatatttttatttgatgcagcttgcgcagggggtatagcctgcggcaatggcttcgtcgtagctggaaaagaggacttggttcttttccgcaggcaggtttgcgcaggtgggcagatggaactttttgctgttcacgttgccgatgtaagcttgctgcgcagtgctggaggacgacgggtcggtggggttcagctggctgtccggcacaaagcgctcggtgcccacggtgaagttctggccgtcgctgccaatggtgatggtgccctgcaggtcggtgcggtagacgtccacctttgcgtcccgcaggatgctcagggtctcctcgtggggatggccgtacttgttgcccgtgccacaggagatgacgcccatttccggcagaacagcgttcagaaacaggtagccggtgctggtgctggagccgtggtgccctacttgcagtacatcggccttcaggttggcaccgctgttcacaaggtcggtctcggcggtcttttccatgtcaccggtcagcagaaagctggtgctgccgtagtcgatgcgcagcaccagagaggtgttgttggtctcgctgtactgcgttaccgggcccagcagggtaacggtggcgctgcccagcggccagacggtgcccacggagggcacttccagctgcaagccctgctgctgcgtatacttgacaaaatcgttgaagcatttggtgctgccctcggttacggggctgtaagcgtgtcccgccgggaactttgccattacggcggcaagtccgcctacatggtcctcgtgggcatgggagcagaacacatattgcagctgctccaccccctgcttttgcaggtaggagaccaccagactgccgtcgtccacgttgccgccgtcgtagagcatgaactgtccgtcacactccaccaatacgctcaacgcctgccctacatcaatgaagtgcatctcaaagggctgacttgtcccggtggagggcttgacgatgtgtccgccgctgccgggcaggctgtcacaggcggtaagccccagcgccagcacagcggccagcgccagcgcagccagccgcaggaacaggcggcgggggagcagggttattttttcttctttccagttttccacgttgcgttctctttctgttgattattcttgggtttgtggccgggcgcagagttgggcgcaaagcgtgcgcccgggctgggctgacggcctgccggggcagcggcgcgggcatttttgccggtgctgcgtcctttctggttggaatgtacggtataggtgccatcgttgtggatggtcacctcggcgctctctgcccggcgggcggtgcgctgcacggcgcggcggccgacggcgggcaccagcagggggatcaggtcctcccggtgggtcagctgcaaagccttgaccaccttttcggcgttgcggggctcgtagtattgcagcagtgcgcgctgcaatgccttgccctcgggggtcttttccacaaataccggcttgagggtgtaggggtcaaggccggtatagaacatacaggtgctcacggtgccgggggtggggtagaagtcctgcacctgctccgggcgcatgtggttcttataaaggtactcggccagatagaccgcatccttcagggtgctgcccgggtggctggacatgaggtagggcaccagatactgttttttgcccgccttcttgctcagttcgtagaatttatccttgaacttgttgaaggtctcgatggggggcttgcccatgtaggcaagggtgttgggggcgcagtgctccggggcgacctttaactggccggacacatggtattctaccagctccttgaagaaggtatcgtccgggtccgccatcaggtagtcgaaccggatgccgctgcggataaacacctttttcacgcccggcagttcccgcacccggcgcagaattttaaggtagtcgctgtgatccacgatcatgtgggagcaggtggtgggggcaaggcagtgtttgccgccggtgcacatgccgcgcagcatctgttcgcggcaggaggggaagcggaagtttgcggtggggccgcccacatcgtggatatagcccttaaaatccggctcgtgggtcatgcgctcggcttcctccacgatgctgtcggcgctgcggctggtgacccgccgcccctgatgcagctggatggcgcagaagttgcagccgccgaagcagccgcggttctggatgatggagaactgcacctcgcggatggcgggcacgccgcccatgctctcgtagatggggtggtagcggcgggtgtagggcagggcgtacaccttgtccagctctccgcgcaccagcggctttgcggggatgttctgcaccagatacttttcgctctgcttttgcacgatgatctggccgctgaccacgtcctgattgtccatctggatgcggcaggccttggcgtaggcggtcttatcgctggccacctttttaaaaccggcgcactccacataccgctggggcaggtggtcgaaatcggtcaggtagcaggtgccgttcacgtccgtgatggtctccaccggctccccggcggccagacggcgggcgatctccacggtctggtgctcgcccatgccaaagctgatgagatccgcgccggagtcctcggcgatgctgggcagcacggtgtccagccagtaatcgtagtgggcaaaccggcgcaggctggcctccagaccgcctaagatcaccggcaggtcggggtaagcctgcttggcaagctttgtgtacacggtggcgctgcggtccgggcgggcaccggccttgccgccgggggagtattcgtcctcggcgcggggaatttttgcaacggaatagtggctgaccatgctgtccacgttgccgccgccgatgaaaaagccgtacttgggcttgccgaaccgcttgaagtcctcgcagtcggtatagcggggctgcgccagcacgcccaccttgtagccctcggcctccagcaggcggctgatgatggcggtgccaaagctggggtggtccacataggcgtcaccgcctaccaccacaaagtccagctgctcccagccccgggcttccatatccgcccggctgatgggaagaaattcggtgtagatctggggagtagaatgttccataatgctcctttattattcctccggttggttcatctgcatttccagccactgctgacggctgatgagcacggcgcggggctttgcgccctcgtaggggccaatgatgctcttttgctccatctcgtccatgatgcgggcggcgcgggcgtagcccagcttgcagcggcgctgcaacaggctggtggaggcctgaccggcgtcgatgaccacatccacggcctgcttgaacatggggtcggagcctgcgtcctcctcggcgtcggcaccgccgccgccctttttgccgtcctgaatggcgtgcttttccatggcctcgatcatggcctcgtcgtactgcacggtggcgctggacttgataaagtccagcacacggctgatctcttcatcccgcacgaaggtgccctggatacgggtgggcttgggtgcgcccacgggcataaagagcatatcgccctgacccagcagcttttctgcaccggcaccgtccagaatggtgcggctgtctacctgactggacaccgcaaaggcgatgcggctggggatgttggccttgatcaagccggtgatcacgtccacgctggggcgctgggtggcaacgatcaggtgcataccggcggcacgggctttctgggcgatgcggcagatggaatcctccacatccttacccaccaccatcatcaggtcggccagctcgtcgatgataatggcgatgtagggcatcttttccagctccggctgctcggcagccagcttgttgaaggacttgatgtcgcgcacattgttctccgcaaacaggcggtagcggcgctccatctcctgcactgcgctgcccagtgcaccggcggccttacggggctcggtgaccaccggcatcagcaggtgggggatgccgttatactcggccagctccaccaccttggggtcgatgagcagcagcttcacgtcctccgggctggagcggaacagcaggctcatgataatgctgttcacgcacacggatttaccgctgccggtgctgcccgcgatgagcaggtggggcatcttgcacaagtcggtcacctgcgctacaccggcaatgtccttgccaagggcgatgcccagcggcgaggtcatgcgcagaaaactctggctctcaaagatgctgcggatggaaacggcggtctttttgtggttgggcacctcgatgcccacggcgggcttgccgggaatgggggcttccatacgcacgtctgccaccgcgaggttcagggcgatatcgtccgccagcgaggtgatgcggctgatcttcacacccgccatgggctgcagttcgtatcgggtgacagagggcccgcgggagatatccagcacccgggtgcgcacgccgaagctttccagcgtgtccaccagcttctgggcgttggccttcagctcctcctgtgcgccggggtcgctttcctcctgcgttttttcaaacagctcaatgggtgggtactggtactcgtagcggtccaccggctcggtctcctcggcgggtgcggtggcggctgcctgctcggagacagcgggcttttccatggccgcagccaccagcgagttgatgtctttttcctccaccggctcggcggtgatgctgatccagccgtcctcgtccggcgcagagcggaacgccacggcgttctcggcgctcacccggggcacggcgggctggataggcgcagcctccggctgcgtgggcatctgcggctgcaccaccggcgctgccggctggacgatgggagtatcaaaagcgggggcaggggaaggctcttccggctgcggggcctccttggcaaagaaatctgccgcggcggcgactaccgggtctgccacgatgggcggctgcgtgggcttggatgcagggcgcagcgggtcctgtccgaaggtgccgcccggcccgacgatcagcggctcaatgggctcgctgccgccctcggagagggcggtgtggtcggggccaaggtctacgtcaaaggccgcgcggggatgggcaacactgacccgcaccggggtgatgggcggcgcggcaggctccggctgggcaggggcggcgggcgcagcctcagtttcggcagcgtctgcctccatctcctgcgttaccttgtgtccccagcgcagcacaccggacatccagtccggcacccccagatgcagcccggcaggctcgtcctcctcgtccagcggctcgtcctcggtttcgtcgtattcctcgtcgatctcccgctctgcctgccggatggcggcgcgctcggcgcggcgggcagagcgctgctctgcaaaggcagcgccgcgggcgtggataccgccggtgacggcacacagccagacccagacctcggcgggggtaatatcaaaaatgtacaggctgccgcacagcaaaagcacgaccatgatgagatttgctgccggacgtccgcacagcaaaagcagcacgccgcccaacacaaagcccattgcgccgccggagagccatgcattgacgccgttggcgtagcaggcggaaagcatttgcagcgccgacagcccctgcggctggatatcggaaaacacgatgaccgtgccgcagacaaagataagccccagcaccagcttgaggatgcgggacagcagctcctcgccccgggtgtacaaaacggccagacagcacacggctgcacccagcacaaagctgccgcagccgaacagcccgaacagcacatcatggagcacccgccatacggaatcgccccgcacaaaggccagcaccatcagcagcaggccgccgaacagggtgccaagccctgccggaagccgctgctctgcctttttacggcgggcagcagtacgccgtttcgttgattttcgttttttcgttgccattctactctgttccccaacttcccatagacacaataattgattctattattgtaccacgcaagggcaaaaatggcaaaccataatgttgtttttcttgaggaaaatggaacgaacccagcccctctcgtgaaaaggcgtttggagcgctccgcaaagcgcgacaaacgcgaaataaaaaataatttttccgctgttcctgcgcaaagcgaacgcggagcgcagttcaaatcgtccggcggggagacgcaaggccttacccccgttcgatctccccgtacagccacgccagcgcgtccgaaagaccgcccagctcgtcgatgagcttttcctttacggcacggcgtccgtccagcaccgtgcccatgtccatgaccagttccccggtgtggagcatcagctgggtgtagcgcttttccggcatgccgctgtgggcggccacaaagccggtgatgcgctgctgcatctgctcaaagcagtgcatggtctgcgggacgcctaagatcagcccggagtgccgcaccgggtgcaccgtcatggtggcggtggggacgatgaagctgtgccgcgcgctgaccgccagcgggatgccgatggagtgcccgccgcccagcaccagcgtggcgctgggcttggagatgctggcgatcagttctgccagcgcaaggccggcctccacatcgccgcccaccgtgttcagcagcaccagcagcccctcgatgcgggggtcctcctgcaccgccaccagctgggggatgacgtgctcgtacttggtggtcttttgcccctgcggcgcttcggtgtgcccttcgatctggccgatgacggtcaggcagtggatgacatgaccgccccggctcagggtgaccgtgcccagatcctcaatatcctctttttccatccggtgctgctctgcgggggtgtcttttgccgtatccatgcgcgttctccttccgtagcagggtctttgtggggtcagtatcccccggctgccggggaagtatgcaggagagcgaatacaaaaaactttgtgaattttttgcttttttacaaataggtatttgacattcgcctttcatgctgtatactttaaataatataacaggataaaacggaacatctctctgcgcgcaaagaagccccttgcatggcggcagaagctgcagcgcgttgggcagaaaggagaattttgctatgaacaccccccagaaagcatcgatccctgtgatcaagcgtctccccaaatattaccggtatctgcgctccttgcaggccgatggcattaccagcatctcctcccgggagctggcctctcagatgggcaccaccgcctcgcaggtgcggcaggactttaactgcatcggtgacgtgaacggacggcagggcatcggctactcggtggagaacctgctttccattctggaaagtctgctgttcggcaacggcgaccgtctgcccaccattctgatcggctgcggccgcctgggcaaggctgtgagccgctttatcaccaccgacaccaacggctacaagctgatcgcggcctttgacgtggccgagaacgaggtaggcaaggagatcagcggtatccgcatccggcacattgacgagctggaggccttttgcgaggaaaacaagcccaaggtggcggtgctctgtgtaccccgtgatggtgcacagcaggtcagcggacggctggtggatctgggcatcgagggcttctggaacttctcccactatgacctgtcggtgtcgtaccccaatgtggtggtggaaaacgtccatctgggcgacagcctgatgagcttgggctaccgtctgcgcaatcaggagtgacggcatggcaaaattgtatttccgctacggtgccatgaacagcggcaagagcacggcgctgatgcaggtggcacacaactacgaagagcagggcatgaaggtgctcattttgaagccgcaggtggatactaagggcggcggagaactggtgagccgtctgggcgtgcgccgcaaggcagacctgctgatcccgccggagctggacgtgttcgaagctgtgcaggcggcaaacgctgcttccgggccgctggcctgtgtgctgtgcgacgagagccagttctttaccccggagcaggccgagcagctgttcatgatcacggtagatctgaacatcccggtgatctgctacggtctgcgggcagatttttccctcaagggcttcccgggttctacccgtctgctggagctggcgcacaccatcgaggagatgaagaccatctgcacctgcgggcgcaaggccatctgcaactgccgcaaggtgaacggacggttcgtctttgagggcgagcaggtagccatcgaccttgaaaacgatgtgcagtatgtcagcatgtgcccccagtgctacttcaaggcacggcgggcgttttacgctgcaaggaaaaactgagatacttttatgttgtatacaagccgctgtaccgcgccgggtgcagcggcttttttgcgtgatttgcggaaggggttccccgccagagtctccaacaggctgtatacagactgatatatcaatttgttgcattttgcgagaggaactgatatatcaaccgggcggaattcgcacgttttttgcactattgatatatcagttcggaccgggcagttactcgacggaggggagagggaatgggagaagaagagagcgacgggggacggcagagcacaaaaaattacaggcggaacggtaaatgtaacaggaattattgagatttttcctgttctgcccttgttgcatcccagatttttatgcaagtcattgaagtatacaagttgcacagtttttcagcgcaagtttattcatttcggcaaggacgtcgaattgcacgcgaaaacaagggcaatatttgtacgtttttatcccgtatcactgtaatttgcatctttcttttttcagtggcttttgttatcataattgtatacaagggggcatgtgcaggccccctacatgaagatgttttctattaggaggagaacaaaaatgagcaaggcaatttctcgtcgtaacttcctgatggctaccggcgctgtcggtgctgcaggtctgctggctgcctgcggcagcaagcccgctgcttcttccaccgcttcttccgctgcttctcaggcccccgctgcttccgcagacgagagcctggccctgtctgacggccctgtcagcctgagcatcagctggtggggcggcgacagccgtcacgctgcttaccagagcgctctggaggctttccaggctgagcactccaatatcaccgtggagcccaccttcgccgcatggtccggctgggaagagaagatggctgctgccttcatcgcaggcaacgctcaggatgtctgccaggtgaactggaactggctgtacaactactctgccgacggtagcaagttcgtggatctgaacaccacctccaagttcatcgacctgacccagtgggatgccgctgctatggacgcttgctatgtggccaacagccagcagtgcgtgcccgtctccatgaccggccgtatcttctactggaacatgaccacctttaataaggctggcatcaccgaggtccccaagtctctggacgatctgatggctgccggtaaggctttccaggagaagctgggcgacgattactaccccatgcacctgggcgcatacgaccgtatgatcctgatggtgttctacctcgagtccaagtacggcaaggactgggcagatcccgttacctccaccctgaactacaccgaggacgagatcgctgagggtctggccttcatcaagagcctggtggacaaccacgtcatgatgaacctgaagacctactactctgcaaactccgataccgctacccaccagtccaacgagtggatcaccggtaagatcgcaggcatcttcgagtgggattccgctgcaagcaagtactcctccgctctggacgacagcaataaggacggcttcaccgtcggcgaggagatcaagttcggcgacaacaacggcggcttctccaaagtgtccatggggctggctatcaccaaaacctgcaagaacgttgccgaggctgctaccctgatcaacttcctgctgaacgaggagaagggcgcttccatcatgggttctgagtgcggcatccccgcttccaaggctggcctgaagttcgctcaggacgccggcgctgtcaaggacctggttgctgaggcaaacgccaaggtcatggccttcaccaccaacaaactggatcccctgttcgagaacaacgacctgaaggcttccggcaccggcatctatcaggaagtgttcgacaacatcgactacggcgatcagacccccgaagaggctgttgagaccctgctggacggcatggagtctgtcggctacaccatcggctaatcttattgcactgacagcagcctgaaccgggtaactgtattttgaatgaaataggggcatctgccgcccgtacgacagatgcccttgttttttcggagaatggttatcaaaccttgaatgaattgttgccggtctgtgacctgctgcactgtctgcttcaaatcctgtaaaaggaggacttcggatgaaaaaaagtaatgcgcccgccggcgcacgaactccgttccagaaatgggtcgataagtatcagggtctgttttatctgatcccctggatcatcggctttctcgtctttaaggcgttccccttcggtcagtcgctgtactacagcttcaccgatatgaacttcttcaaggacggcaccagctttgttggtctggccaactacattaccgcattccacaccagaaagatcaccaaggcgctgatcatcaccttcaagtacgcctttatcaccgtgcccctgaagctgatcttcgcactgttcatcgcctacatcctgaacttcaagatcgcctgcgtcaacctgttccgcactgtgtactacatcccctccattctgggcggctctgtggctatcgctgtgctgtggaaggctgtgttcagcgtggacggtctgctgaacaccgtggtgcgcgctgtcacctttggtgcggtgcagggacccgaatggctgtctgaccccaactacgctctgtggatcatctgctttttgcgtatatggcagttcggttccgccatggtgctgttccttgctgcactgaagggcgtgcccgcagacctgtacgaggctgctaccatcgacggtgccggcaagtggcgtcagttcttctccatcaccgttccgatgatcacccccatcatcttctacaacctggtcacgcagatctgccaggctttccaggagttcaacggcccctacatcatcaccaacggtggtccccgtggttccactaccctgatctccctgctggtttacaactacgcattcaagtcctacgacatgggcatggcttctgctctggcgtggatcatgttcatcatcgtctgcatcctgacgatcattgcgttcaccagccagaagaagtgggtctactactcggatgaaaggtaaggtgaccaatatgggaatgaaagcatcgaataagatcgcaaccttctttaagtacttcgtgctgatcctagttggtatcatcatgatctatcctctgctgtggatgatcagcgctaccttcaaggacaacagcgagatctttgcaggcatcagcctgtggatcaaaaagcctacgctggatggctaccgcaacgccctgaacaacttcggcggctccatcaacatcctgcaggccatgctcaacacttacagctatgtcatccccaaggtgatctgcactgtggtgtctgcctgtattgccgcttacggctttggccgtttcgacttccccggccgcaagctgctgttcaacatcatgctggccaccctgttcctgccgcaggtcgtgctgaacgtgccccagtacctgctgtacaacaagttcggctgggtggacagccccttctatctggccatctgggtgcactgcgcatttgctaccgagacctacttcgtgtatcagctggtgcagttcatgcgcaacgtcccgcgtgatctggacgaggctgccgccattgacggctgctcctccttccagaccctgtacaaggtcatcgtgcccatgctgggacccgctctggtgtcctgcgcactgttccagttcatgtggagctgcaacgactttatgggcccgctgctttacgtcagcacccccggcaagtaccccatgtccctgttcgtcaagctgtctatggacggtgataccggctttgcatggaacaagatccttgcactgtccctcatctccatcctgccgcagctgatcgtattcttctgtgcacaggatcagttcgttgaaggtatctccgcaggtgccgtcaagggctaatgcgccataagaacatctgaccaagaccaacaccccctgtgctgctcccaacggatggcacagggggtgttttggttgatacatcatttcgtctgcttcttgcggtactgcaaaggactgatatccatcacctcgcggaacacgcggcggaagtgggcggcgctggcaaaaccggtctgctcggcaatagcgctgatggaaagctcggtggtctccagcagcttctgcgcagcctcgatgcggcggttgttcaggtagtccacaatggactgcccggtcacccgccggaacaggcggctgagatagtagggggaaaggtagaaccgcgccgccacctcggtaagggagaacttttgccggtagttggcggcaaggtaggcacacacctgctcaatggtctcgttgcggggacgcgctgcggcgctgctctcggcaaggcactcctgctcgacatagtgcaggatcagcagcaggtacagcccgccagggtagtcctgctccggcatggcagagcgcatcatctccagcagggtgcgcaggcggcgaacccacggcaccgggccgtacagcaccgttgcctcgccgggcaaaaacagccgggcaaaatcccgctgggtggcgctgcgcagttcgtgcagggcgctgagcgggaaccggcagcccaccagttccggtacggttgcaccggcggcggtgagcaccgcatcccccgcgcccagcagcagcgcgctgccggggtttaccagcaggctgttttctcccatttgcagggtgcagctgccctcgcttaccagcagaaaggtgcacgtctcctcgtctgccgtcagctccagcttgctgccgttcagccgcacggtgtccgcttttacctttgcatggatcttttcccgttccgctttcatcttgcgcatcctttccggaaacagccctcccggtagccgggagagcgcttttcctcatgataccacgtctgccccgtgggggcaagacaaactcacaggaggttatttcgcatgaatctgaccctgattcgttccatgacccgcagcgccgttttcgagctggaaaacgaactgtgctaccgtccggcacacccctttaccgttgccctgaacggcaaaacggtgtatgaggcctgcaacaccaacgtgttctccctgttctccctgctgcccggcaccgcctatacggtggaggtgcaggccgaggacgagaccctgaagctggatttcaccaccgaggccgagaccttctttgtggatgctgcccgctatggtctggtggctgacggcgagaccgacaacaccgtgcggctgcaggcggcgctgtccacctgccccaagggcggcacggtgtatgtgcccgccggccgttaccgcaccgccagcctgttcatgaagagcaacaccaccctgtatctggaaaagggcgcggtgctgctgggcgacaacgaccgcacccattaccccatcctgcccggtgtgctgcccagcgagaacgaggtggacgagtactacctgaccggctgggagggcaacccgctggacagctttgcaggtcttttgaacattacgcaggtgcatgacgtagtggtgaccggcgagggcacgctggactgcgatgccgaaaacggcgactggtgggtgaaccccaaggtcaagcgcatcgcatggcgtccccgggccgtggctgcggtggacagcgagaacgtctgcctgcacggcatcacggtgcagaacagctattcgtggaccatccaccccatctttgtcaagcacctcgacctgctcaacttcaacatcaacaacccctacaacgcccccaacacggacggcatcgaccccgagagctgcgagtatatccgcatcatcggcatgaacatccatgtgggcgatgattgcatcgccatgaaggccagcaaggtctttctgggcatgaagctgaagcgcagctgtgagcataccgtcatccgcaactgcctgctggacaagggccacggcggcatcgtcatcggcagcgagatgagcggcggcgtcaaggacatggtggtgacccagtgcctgatggaccacaccgaccgcggtctgcgcgtcaagacccgccggggccgcggcaacaccgccgtcattgacgggctggtgttccgcaatgtggagatgcggggcgtcaaagcaccctttgtcatcaatatgttctacttctgcgacccggacggccacggcccctatgtacagtgccgcgagccgatgccggtggacgagtacacccccaagctgggcagcctgaccatggagaacatcgtggctaccgatgcccagtttgcaggctgctatttcgatggcctgccggagcagcccattgagcgggtaaccatgcgggatgtgagcatcacctttgaccccaacgccaaggagggacaggcggccatggccgacaaccgtccgctggtgaaaaagctggccatctatgccgagaacgtcaaggaaatcgacctgcacaacgtgaagatcgagggctacgagggcgagcggctgcactttgccaacgtaggacattttgaggaggactgacccatgacccatgaagagatcctgtccatgctgggcgactatgtggactacctgatcgccaattccagcgccgaggcaccgatgtggaacatcgagaaggtgcgcagcggcaagcccaacaagtggaactacatcgacggctgcatgattaccgcctgcctgagcctgtacaagaccaccggtgacgagaagtatctggagttttccaaggagtttatcgactactttgtgcagccggacggctccatcaagacctacgaccccaaggagtacaatctggacaacgtgaatcagggcaagaacctgttcattctgtatgatatctacggggacgagaagtaccgcaaggccatcgacaccatccgcagccagctgctcacccagccccgcaccaaggagggcaacttctggcacaaggacatctatccgtggcaggtgtggctggacggcacctatatggcgcagcccttctacatggagtacgagacccgctttaacaagatgcagggctgcatcgacagctacaagcagttcatgaacatcaaaaagcacatgcgggacgaaaagaccggcctgtactaccacggctacgatgagagccgccagatgtactgggcagaccccgagaccggttgcagccccaacttctggctgcgcgccatgggctggttccttgtggcaatggtggatgtgctggagcgcatggacgagcagctgtacaacgagtatcgcggcatcatggccatgctcaaacaggctgtggaggacatgcacaagttccaggacgagcagaccgggatgttctggcaggtcatcgaccacccggaggccgagggcaactatctggagaccagcggcaccgccctgttcacctacgcggtactcaagggcgtgcgtctgggctacctgcccaaacgcatggctgcatgggcggagaaggctttctacggcacctgcgaccggtatctgtccaagaacccggacggcagcttgcagctggacggcatctgccttgtggcaggtctgggcggcaaggatcaccgtgacggctctctggcctactacttcagcgagccggtggtctgcaacgacgccaagggcgtaggcccgctggtgctggcctataccgaaatgatcgcacggaagtaaccaaaaacgggatacagcaaggctgagcagctgcaaaaagtggctgctcagcctttttgcgtgtcttttttgtccccttgcataaactgcccgccgctgtcccacactaagcccagaaaagttcccgtacacaaaacgaacagatgggagtaacaagcatggagcagatcaaaaaatttctgcacggcaagggctttgctctgctgctgaccgcaagcctgctggctgcggctgcggcaggggtgtgggcggtgcgtgccctgcgggcagaactgcaaaaaagtctggatggactaaacgcccccggcaccacccaacagaccaccccggaaacagaaccggactgggacgcacaggaggacaccacatggcagcagcccgtgaccgacgttgcaaacagcaaggcagatgtgccgcagcagacgccctctggggcatcctctggtgcgcagtctggctctggttcgctgcgcgaaccctcggcactgcaaggcgcatcctcgcctgccagcagttcggcgcagcctgccgccgcgccctctatgccggggcgcgtgctcaacgccttcagcggtgatgagttagtctacaacaaaacgctgggagactggcgcacccacaacggcgtggactacgcctgcacgcagggcgctgcggtagcggcacccgtggcgggcaaggtggtgtctgccggggcagagggcaactggggcaccgtggtggtgctggaagatgccgctggccgcagttggcggctgtgcggtgtggcggaccctgccgtaaaggcgggggataccgtagccgccgggcagaagctgggcacggtgggcactgtcggctgcgagtgcgccgaggaaagccacatccatgtggaggtaaagcagggcgaaagctacctcgacccggcaaagctgccggagtaagcaaaccacaaaaggggctgcaacagcggctccttttttgctgtgtcagacggtacggcgcgtttgcagcagccagagaaccagcgccgaaagcaccccggctgccagcagtacatctgcggggtgtgcggcccagtgctggaaggcaatgccgtaggctgcctgcccgatgggctgggtcaggcaggccagcacggtgcaacaggcggtagttttgcccagctgtgcctgcggcaccagcacttgcagctgcgcaaagaaccatacattgaacagcgctgccacggccataaacacggcccccagcaccagaatgctgccgaactgcagcactgacacccggagggcaagacccagcgcggcgcacacgccgctgagcgccagcaaaagaggtgtgccgctgcggattggatgacggacaaagacggttccggccagcacgccgcctaaaatgccgcctgcgctcagcaccgcctgcacaagaccaagggaggcatcacttttctgcagggtctgtaccaccagcaccggaacacctacggtgagggcggggacttccagcaggtttacagccgccatggcggcagctaaccgcagcaccgcagcctgcccggtgaggaactgcgcactttcccgcaggtcggcccacagagaacggacggagagctttgtgtcatatgggacatcctgtgggatgcgcagacagagctccatcccggcagaaagtgcaaagcagcagccgcagagcaccagcagaccccggatgccgaggtgctccagcagaacagcacccagcaggggaccgagaagctcatccacggtatccaccagttggatgactgcgttgccgcgcagcagctgggtgccgttcagtagcagaggcaggcaggcgcgtaccacgggctggtaaagcccctgaatggcgtacagactgcccagcactgtcaggaccagcggaagcaggggcagatgcggcaacccagcagcggctgccgccgaaataccggcggtcaccagatccagcagtgccatcaggcgggctttacggcagcggtctgccagcgcgccgccggtcagcattccagcaagggcgggcagcatggccagagcggtgatgccaccgtacagcgcggcagaaccagtctgccgcagcagatacagcggcagcgcaaaccgcagggcggcattgccgaacagggagacgatctgtccgaggacgataaggacaaaagtgttcatggaaacctcctgcttttttatttacagactgttggtctgtatttacatacaaaaaaaggcggagcgttccgcccgggaaattcagtctttgaccggtgtgcacagctgcaccagctgctcggcctgcgcatccgtcaaaaggtccagcccaagtgcatgggtcatttgctgaaacacgacgttccgcgcccgctgctgggccggtgtggtggggcgcgtctgaggggaaagccagatgtctgccagcacgaacagcgcttcggccagcgcattggcgttggcggtgtggatggagccgtctgccatgccctgccggatcatgggtgcaatacactccggggctaaatgcgcttcaatgttggtcagctccatggcaaggaactgcgggttgctgcacaggtgcggcaaagtctgcgcgatctgctgctgccgctgcccggcaaaggaaactgcaaacaccgcctgcagcttctgcagcccggtcagggccgggtcgtcccggatatggcgcagcggctcccacatctggtcgcccaaacggtcaccgacgcgctgcgcgatctcctccttggagcggaagtgatggtacaccgcccctttggaaagctttgtggcatcgatgatgtcctgcagggtggtattctggtagcccttctggaggaagagcagggcggcggcgtccaggatcttttcaacggtctgttccgggtatttgttgcgcggcatggcggatgctccttttttacaaactaacggtctgtaaaaagaataccgcagcccggcggctttgtcaagagggcatggaaccgaaaatccattcatttcctgcggcgctgcattgcttttgcgcggggtttctggtatgatacaatagaatcaacaggcgattttgggaggatgacagatggcaagggttttgatcgtgggagccggggcagccggactgatggcggcgggtgctgccgtgcggcagggacatcaggtgacggtgctggagcataccgagaagcccgggcagaagatccttgtcaccggcaagggacgctgcaacgtgaccaacgactgcccggcagaggagtttttgcgccatgtgcgcacgaacccgcgctttttgtactcctctctgggagcgttccccccggcaaagaccatggagctgttcgaagccttgggcgtggagctgaaggtggagcgcggccgccgggtgttcccggtatcggataaggccgaggagatccggcaggcgctgctgcgctatgcgcaggacgccgacatcgtctacgacggcgcaaaaaagctgctgctggaggacatcgtgccggaggcggagcctgccccgatggcagcggaaaacccgcgtcaccccaaaaagaaaaaggctggcccggcactgcgctgcgtgggcgtgcggggcacttccggccgggaataccgggcagacgctgtgctggtggccaccggcggcgtaagctaccccaccaccggttctaccggcgatggctacaagctggcgcagcaggcggggcacacccttgtggagccggtgcccagtctggtcagccttgtcagccgggacccggactgcaaaaagatgatgggtctggcgctgaaaaacgtcaccctgaccctgctggaggacggcaaggccatctttgacgagcagggcgagatgctgttcacccactttggcatcagcgggccgctgaccctgagcgcatccagccatctgggggacatgaaaaagcacaggtacatcgcggagatcgacctgaagcccgccctgagcgaggagcagctgtacgatcgcatcacccgggactttgccctgctggcaaaccacgcggcgcagggtgcgctggtcaagctgctgccttccagtatgcagccggtcatggtggcgcgctggggcattgaccccgccaccaaggcaaaccagatcacccgggagcagaagcgggagctggtgcggctggtcaagcactggcaggtgtccattgacgcccggggcgaccttgcccacgcagtcatcaccagcggcggcgtatcggtgcgggaggtagaccccaagaccatgcagagcaaaaaggcgctgggactgtactttgcgggcgaggtgctggacgtggacgcctacaccggcggctacaatctgcagatcgctttctgcaccgcacaaagctttgcgaataacctgtaaaaacagcgcagtcaatttcctgtgtactatatataaataaggagaacatatcatggtatctgttgcaattgatgggcctgcgggtgcaggcaaatccactctggcacgccgtctggcggcagagctgggctatatctatgtggacactggtgcaatgtaccgcgccatcggcctgtacgccctgcgcgcgggcaaggaccccaaggacaacgcagcggtggatgctctgctgccggaaatcgagctgcggctggcgtccattgcgggcgagcagcacatctacttaaaggacgaggatgtgagcgccgccatccgcaccgaagccgcgggcatggcagcctctgccgtgggcgcaaaccccgcggtgcgggcatttctgctggagctgcagcgcagcatggcaaaaaagcaggatgtgctgatggacggccgggatatcggcacggtggtgctgccggacgctacggtgaagatcttcctgaccgccagcccggaggcacgcgctacccgccgctggaaggagtatcaggccaagggcatcgacaccccctacgaggaagtgctggcagatgtgaagcagcgggactatcaggacacccaccgcgccgccgctccgctgaagcaggcagaggacgccgtgctgctggatacctcggcgctggattttgagcagagccttgacgctatgaagcagatcattgccaaaaagatcggcggataaaacaaacaggacaggaataaaaaatggtactatattatattctggtgccccttgcatggcttgtgtggcacatcggtttccgcatccgggtggaggggcgtgaaaacctgaaaaaggtgcagacgaagggttatatccttgcgcccacccatgtgtctgccatcgacccggtgttcatcgttgtcacccggtggggcaggcggatggtggtgttcgccaaaaaggagctgttcgagatcaacgcactgctgacgtggttcttccgctgctgcggcggtgtgtgtgtccgcggcaccaaggacgagatggcggtcatctcccagacggtggaggcctgtaagcagggcaagaccctgctcatcttcccggagggcacccgcgaaaaggagggcaagctcctgccccctaagagcggtctgttcgtcattgccgccgaggcaggggtggacgttgtgccctgccgcatcttctatgataccccggacggaaggatgcacctgttttgcaaggtgcgggtgatctacggcgagccgatgcccgcagcacagtttgccatggagggccgccgggacaccaaaaagctccgtgccaacaagcaggcgctgctggaagcatgggaaaagatgggggcgtaagagatggagatccgtttggcgaaaacggcggggttctgctttggtgtgaaccgtgccgtggaactgacctacggcctgctggccgaggggcataaggtggcaacgctgggcccgctgatccacaacccgcaggcggtggaggatatgcggcgcaagggtgcacaggtagtggacaccgtgcaggatgtgcccgccgggtgtgaggtggtcatccgcagccacggggtgccccgcagcgtttacgatgaactggaagcgcgcggcatcccgtactatgacgccacctgcccctttgtgcagaagatccagcgcattgccgccgaggccgaaaaagagggtgcggtgctgctggtggcgggcgataagacccacccggaggtgcagggcattgtgggacacacccggggcgaggtgttcgtttttgccgatttagccgagttagaggcgtggaacggcccttctgacccccaaaaacccctttttgcagttgcacagaccacatttcaggttacaaaatggaaagaaagttcggagtttcttaaaaaagcctatacaaacgcccgaatttttgatacaatatgtaatgcgacgtgggcgaggcaacaggaagcggaagacctcagccaaaaatgcgacattgttgttgtcattggcggtcatcattcttccaatacccaaaagctggtacaggtcgccgcaaaacacacgcgtgccgtaacggtcgaaacagcgagcgaacttcggccggaatggtttgcagatgttaaagtggcgggcgtgacagccggggcttcaacgccatcgtctattattgaggaggtacttaacagtatgagcgcagaaatcaatgacaacatgagctttgaggagatgctgaacgcatccgaagaaaagcgagttcatgcaggcagtattgtgaaaggaatcgtgaccagcatctctgccaacgagatccaggtggatatcggtgcgaagcagaccggctttgtcaagctgagcgagctgaccgatgattcctccgccaaggtcgaagacctggtgaaggttggcgatgagctggacctcatcgtcgagaaggttatggatcaggatggcgtcatccagctctcccgcaagaagctcgcatctcgcaagggcatggaagagatcgccaaggcagcagaatccggtgaagtcgtcgagggcgatgttaccgagttcaataagggcggcgttgtcgtcaacgtcaagggtgtcaaggtgttcgttccccgttctcaggccactatgcgccgcgacgaggactacactgctctggtcggccagcacgttcagctggtcgtcaccgagtgctccggccgcaagatcgtgggcagcatcaacaaggtgaccgctgagcagaacaaggctaagcgcgaggagttctgggcaaacgttgaggtgggcaagacctacaccggcgttgtcaagagcctgacctcttatggtgcattcgttgacatcggtggtgttgacggcctgtgccacatcagcgagctgagctggaaccgcatcaagcacccctccgaggtcgtctccgttggtgacaccatcgaagtgtatgtcaaggacatcgacaccgagaaccacaaggtttctctgggctacaagaagtccgaggacaacccttgggagcagctgaagaacaactaccccatcggcagcaccttccatgctccggtcgtttctctgaccaagtttggtgcattcgtccgcatcctgccgggtgttgacggtctggtccacatcagcgagatcagcaatgaccgcgttgagaaggtctccgacgcactgaaggtcggcgatatggtcgatgtgaagctgctggatgttgacttcgacaagaagcgcatcagcctgtccatgaaggctctgctgaacaacgacgctgagtaatcagcccttcgtgcaaaagcatagcttctgacacaatgcgatctgcagccccgttgccgggaaaacggcggcggggctgtttttgttaacaaagccatgataaaattcttcaaaaagcactgggaagtgcttagttacctaatctttggcgtgctgaccaccctgctgaatattgtgctgtacgcgctgttcagccgcctgttcggctacaccgccgccaacagctggggcaatgtgctggataacgctttgtgcatcctgtttgcctactgtaccaaccgggcgttcgtgttccgcagcaagaccaccggcaaagccatggccaaggagttcggcacctttgtcacctgccgtctgggcaccatggtgctggatgccgctatcatgatcgtgggtggcaatctgctggctgcgcagggcgcggcgctgatggacggtctgatcggacattttatcccgtccggggtaagctataccggcgcggcggcttcggcagcagcatcggcagcgggtgttgtcatcattggcggtgcagacggccctacggcgatttttgtcagctataacgcgcaggagctgtggggtctgtgcgtcaaggtattctccaacgtggtggtcgtggtgctgaactatgtgttcagcaagctgatcatctttaaaaatcgtaagtgagatattttctccgccgcaggcggagaaaatatccaatataatttaggaggtacggtattatgaaacgtggtctgaaagggttcgcattcctggtttccggtctggtgctgggcatcattggtgcaacggcatcggtgactgcgatcgcactgagcgctgtgggcatggcaaaggtgcgccgtgccagcaagtaaaacaacggaggaacgaacatgaaccgcgaagagatcctgtcccatgtcgatcataccctgctgaagccggaggccacttggccccagatccagcagctgtgtgacgaagccattgcaaaccacaccgcatccgtctgcatcaacacttgctacgtcaagcaggctgtggagtatatggcgggccgcatccccgtgtgctgcgtggtgggcttccctctgggtgccatggataccgccagcaaggcctttgaagccaagactgccatcgaaaacggcgcagccgaggtggatatggtcatcaacattggccgcctgaagaacaaggagtacgatgctgtccgcgaggacatccgtgccgtgaagcaggctgtgggcgataagattctgaaggtcatcattgagacctgcctgctgaccgaggaagaaaaggaaaagatgtgcgacatcgtctgcgaggccggtgccgactacatcaagaccagcaccggcttctctaccgcaggtgcaaacttccacgacgtggaactgatggtcaagggcgtgcgtggccgctgcaaggtcaaggctgccggcggcatttccaccgtggaggatatggagaccttccttgcactgggcgctgaccgtctgggcacctcccgcgctgtcaagatcctgaacggcgagcaggcaaagggctattaagttttctgcaaaaaatgtatttcggcaaagctctgggcttggctgaactgcaaaggatgatctctcaagggctgctgcacaaattgctgtgcagcggccttttttgcgcccaagctttgcaagcagggcgcggcagggtgtataatatagataggtattgtataaaataggggctgctcgccttgtggggcaaggcgggcagaggaggaaatgcaatgaatatacccgagatccttgtggccaatggcacaggggcggtgctggtaagctttctgcttttattgcgggtgcgcggcgagagtaaaaacagcgtgggaacagagctgttttgccggattctggtggtgacgctgctggcacaggccacagagacgatcagctttctgctggacggcgtgcccggcgcggcaagccggttctggctgtacctgaccaacaccgtctgcaccggcgctaccgtgtgcgtgggctatgcgtggtgcttgtatgtggacttccgggtttaccgcagcattggacgcctgcgcagaaggcacctgctgctgggcgcgccgctgctggcgcttttggtgctgctggtggcaaacctttttggcacggggtggatcttttccatttcggcggacaacgcttaccatcggggcccgctgaatattttgctgtatctgctgctgttcagctattacgccgagagcgtgtggcaggtgcataaggccaagcgcgatggcattacggtggagtttttcccggtgtactacttcgtggtcacctgtgcagtgggcacgctgctgcagggcgcattctacggcatggccttcggctggctgtcggtgtccatcgcctttgtgcttgtggacagccagacccgcagcctgcgcggctataccgatgaactgtccggcctgtttgggcgcaagtacatgaactactgtctggaccgcatccacgccacacaggagaaggacgtttacggcatcatgatggacgtgaactgcttcaaggaaatcaacgacacctacggtcacgccgagggtgaccgcgccattcaggagatcgggcacatcctgtccggggcgctggtggcaaactcggtagccatccgcatgagcggcgatgagttcatggtgctgatccgtcacggctcggaggagctgctggacgagatctgcaccgccatcgagcagcgggtgcagcactataacgccaccgctccggcgggcagctttcagctgtccttctccaccggtgtggcaaagtacgagggcggcagcgtggagaagtttctggtggagctggatcagcggatgtacgcagaaaagcgcgctttccacgccgcccgggacggccatgccgcaccggagcagggaaatgctccatcaatttaaaaggaatgtctaaaataagtgcgacttatcttgacaatctgacgctgcaatgatagaatatgtggcgtaccaattgaataccgacttatcaagagcggctgaggggacaggccctgtgaagcccgacaacctgcgcgagagcgtaaggtgccaaatcctgcgggaaaccggaagataagagtgcaacgctcagagctttcggctctgggcgcttttatttttcagaacaaacttgatggaatggtaaatacacgcaactgcaacatttaggaggcaaaaaatggctagacacctgtttacttcggagtccgtcaccgagggacatcccgacaagatctgcgaccagatctctgatgcaattctggacgagatcctgacccacgaccccaacgcccgcgtggcctgcgagacctgcgcatccaccggccttgtgcacattatgggcgagatcactaccaactgctatgtggacttccagaaggtcgtccgcgaggtggtggcagatatcggctacacccgcgcaaagttcggctttgacgccgacacctgcgccgtcatctccaacattgacggccagagccccgatattgcactgggcaccaacgatcaggtgggcggtgcaggcgatcagggcatgatgttcggttatgcctgcgacgagacccccgagctgatgcccatgcccatcagccttgcccacaagctggcaaagcgcctgaccgaagtgcgcaagagcggcgagatggattacctgcgcccggacggcaagagtcaggtgaccgtggagtacgacgagaacaacaagcccgtgcgcgtggacgccgtggtcatctccagccagcacagcgagagcgtgagcatggagcagctgcgggcagacgtgatggaaaaggtcatcaaggccaccatccccgctgagctgctggacgagaacaccaagtactacatcaaccccaccggccgctttgttgtgggcggcccgcagggcgataccggcctgaccggccgtaagatcatcgtggatacctacggcggctatgcacgccacggcggcggtgccttctccggcaaggaccccagcaaggtggaccgcagcgcagcctacgctacccgctgggtggccaagaacatcgtggctgcgggtctggcaaagcagtgcgaggtacaggtggcctacgccatcggcgtggcaaagcctgtgtccatcatggtggataccttcggcaccggcactgtggcagacgagaagatcgagcaggctgtggagaaggtgtttgacctgacccccgccgccatcatccgtgacctcgacctgcgcaagcccatctaccgccagctggccgcctatggccacatgggccgcgaggatctgggcgtgaagtgggagaacaccgaccgcgtggatgccctgaaggctgccgtggctgccctgtaaaaagcgttttaccctgatagaaggtaagtgaagagagaccgctgcacccgaccgtgcagcggtctttttgcgtcactggggaaagagaaggggactcgaaaaaagtactacttttactcaaaaatcagataaactttgcgaaacggtaaagatttggtcgcgtttttgtaagaaactcacattctcttgaaggaaaaggaaaaacagctgtgcaaggcgcagaaaatccacacatgaaacaaattgatatggaacaatcgacaaaatgtgataaaataaaaccagatatgcgcacttgtgtgcatggtacggatggtaaacagcaataaggagttatgtgactatgtctattgaaatttcccctaagtccttctttgagcagcccagtgtggcggatatgcggctgatcgcctgccccggtgccgaggagctgaccggcctgatcgacaagcaccttgtccgttgggcaaaggctgccggaattgaaaaagacaccttcattatttcctgcgactgcccccgcttccagagcggcgacgccaagggtctggtcaaggagtctgtccgcggcgacgatatctttatcgtggtggacccgggcaattacagcgtcacctacaagctgttcaactacgagaaccacatgtccccggacgaccactttgcaaacctgaagcgtctgatccagcctgtggccggtaaggcacaccgcgtttccgtcatcatgcccagcctgtacggcggccgtcagcaccgccgcgtggtgcgcgagagcttggactgcgctgtggccctgcaggagctgcagaccatgggcgtgcgcaacatcatcacctttgacgcacacgatccccgcgtgcagaacgcagtgcccctgatgagctttgataacgccatgcccacctatcaggtgctcaagagcctgctgaagaaggatcccaccctgtccttcgacaaggagaagttcaccgtggtcagcccggacgagggcgcgatgaaccgcaatatgtacttctccagcgtgctgggctgcaacctgggtatgttctacaagcgccgcgactacacccgcgtggtgaacggccgcaaccccatcgttgcccatgagtatctgggcgagagcgtggagggcaagaccgtctttatcgcagacgatatcattgcttccggcgagagcatgctggaggttgccagcaacctgaaggagcgcggcgctgccaacatcatcgccaacgccaccttccccctgttcaccagcggtctggagaagttcgacaaggctgtggcaaacggcaccctgacctacgttgtgggcaccaacctgacctaccgtatgcccgagctgctgacccgcgactggtatgtggacgtggatgtttccaagtacgctgcctactttgtggtggctctgaaccacgatatgtccgtttccagcatcatcgaccccctgaagaagatcgagaacctgctggcaaaccgcaagtaagatcgctgttccaaagcccctgcaccctgtgtgcgggggctttttgcgttttatgaaaacttctgttaagtttttgaaaattcgtgccgggggctttgcaaatcccggtgggtttatgctatatttaagttgaaatactttgcattctgacagaaaggaaaaacgccatggagcattttgtggagtttgaagatgtctgtaaatattatcagaccggcagtgtgaagatcgctgccgcagaccacctgaatttctatgtggacaagggcgagttctgcatcatcgtggggccctccggtgcgggcaagaccaccctgctgaatattctgggcggcatggacaactgcgacgagggcaacgtctggctggacggccgcaacgtgagccgcttttccgcccgggagctgaccacctaccgccggtatgatgtgggctttgtgttccagttctacaacttggtgcagaacctgaccgcactggaaaacgtggagcttgccagcgagatctgccgcgacccgctggaccccgccgagaccttgcgcagcgtggggctgggcgaacgactgaacaacttcccggcgcagctttccggcggcgagcagcagcgggtgtccattgcccgcgcactggccaaaaaccccaagctgctgctctgcgacgagcccaccggtgcgctggactaccgcaccggcaaacaggtgctgggccttttgcaggatacctgccgcaagaccggacgcaccgtcattgttattacccacaacacggcactgaccggtatggccgaccgcatcattcaggtgcgcagcggccgcatcgtgtccaatcaggtcaacgagcacccggtgccggtggaacagatcgagtggtgagtactgtgcagaaaagttaccgcaaaaatatcctgcgcgagatgaaaagcagcatcagccgggtggtgtccctgtttggcatcgtggcgctgggggtgatgatgctcaccggcctgatgtgcattgcccccgatatgcgcaccgctgcccagaagtactatgtgcagcagaatgtgttcgacctgcgggtgttgtccacccttggcctcagtcagggcgatatcagcgcgattgccgctgtggacggggtagacgccgtgcaggcggtgaagtatcaggacgtggaaggccactggacaggggacgagcagactacggtggcgcggctgtatcagctgcctgccgacccgcaggctgatacgccggagaatatgaaccgtccggtgctgctgtccggccggatgccggaagctgccggggagtgcgtggtgcatgtgatgggccacggcagccccgtggagctgggcacccagctgaccctgccggaagagaccgagggggtcagcgggcaggtgttcacggtggtgggcacggtgcaggacccgctgcatttttcctccgattccgagagcagcaccgtgggcgatggccagctggactgcatcctgtttgtgccggagggcactttgaccgcagattattatacggtgtgctatataaaagcggaaaacgccgggctgtatgataattattccgatgaatatcaggccgcagtggatgccgtagcggaaaagctcaaggccattcagagcgtgcagtgcaccgcccggcgggaagagctgatggacaccgccaacgacaagctgaccgaggcgcgcgccgagtacgacagccagaaggccgaagcggagcgtcagtttgccgaggccgaggcaaagcttgcggacgcacaggcacagctggatgccgccaaggcgcagctggaagccggggaaaaggagcttgccgcccagaaggctgccctgccggacaccatgcagagcggtgccgacaagctggtgagcagcgaggagcaggtgctggaatttgaggaacagttacagcaaattgagatgctggtcaacctgaaaaaggtggcagaccccctgctgacctacgcggaaaccgccctgcgcaacgccgaaaaggcgctggacgaagctgagccggaggacgaagactacattgagctgcgggatgcactggccaaggcgcaggccgcttacgacaacatctataaccagctgcagggctatcagcagcagctggacgcgggcaagcggcagatgtacaagcaggggcttatctcctcgccgaacctctccaacgaccagctggtgaccgaggccaaggctgcgctgcgcaagatgaaattgcagcttttgcagggacaattgcagctgaccaccggcacagccagcgcctacacccagttcgatgccgcacaaaagcagctggaagagggctgggcagaatacaacgccgggcagacccagctggaagaatcccgcaccgagtacgagagccggaaagccgaggcagagcagaagctggcggacggccttgcccagctgaacgatgccgaggagcaggtgagccagatcaaaaagggcgagtggtatgtgctggaccgcacctccaccatgagctgcgtcacctttgcccagtacgccgaccgcatggacgccattgcccgggtgttcccggtgttcttcttccttgtggcggcgctggtggctaccaccaccatgacccgcatggtggacgagaaccgcctgcaaatgggcaccttaaaggcgctgggctactccaatttcagcatcgcgggcaagtatttgttctacgcgatgctggccaccattctgggcagcatcgtcggcatggtggtgggctttgtggtattccccatcattatctggaacgcctatcagctggtgttcagcctgcctaccttcaccctgtacttctacccgggcatggcagccgccagcgtgggcatcagcgccgccgtcatcggctttgccacatggtacgcctgccgttccagtctggccgaaaagaccgcagctttgctgctgccccgggctcccgtggcgggcaagcgcatcctgatggagcgcatcaccccgctgtggtcccggatgtccttctcccaaaagaccaccgcccgcaacctgttccggtataaaaagcggttcttcatgaccgtgctgggcgtggcgggctgcaccgcgctgctgctcatcggcttcggcatacaggattccctgctgcccatcgtcacaaagcagtctacggagctgacccacaacgatatgtccatcaccctcagcgaccccaaaaccctgaccatggagcaggggctggcgcaggagctggacagcaacagcgccgtgcagaactggggcgcggtgtataccaaatccactaccatctacaatgccgcaggcgagagcgccagcgtgagcatcgtggcggcggcaaaggacagcgacttgacccggtacgtcaccttccgcacccgcaaggggcacaaggccatcagctttgacagcggcagcgccatcctgaccgaaaagaccgccgagaatctggggctgcacaccggtgataccttctgggtggaaaatgccgagggcacccgggtggagctgaccctgaccggcatcacggaaaactatatgttcacccggctgtacctcccacgcgtacagctggaaagcctgctgggcacggaggagatcccgtggaacacggtctatggccagaccacctgcaccgatgctgccgggtacaacgccctgcgcaccgacctgctggactgcaactatgtcagcggcatcagctttaccgaggacaccaccgagctgttcgataacctcatcgtcagtctgggctatgtggtggtgctgatcatcatctgcgcggcggcgctggcggctgtggtgttgtataacctcatcagcgtcaaccttggagagcgcaaaaaggagctggcgaccatcaaggtgctgggcttctacgatcaggaggtgtaccgctacatcttccgcgagatcgagctgctggcgcttatcggctccggcgtgggtctggcactgggggtgccgctgcacaagttcattgtgttgaccgtggagatggatcagctcatgttcatccgcaccatcgccccccgcagctacctgctggcggtggcgctgaccatggtgtttaccgtggtggtctgctttgtgatgcggcggcacgtccggcgcatcagcatggtggaaagcatgaaggctccggagtaattacaaaagcaaaaccataaaaagcaccccctgcggtctgtacgggcagaccacagggggtgcttagtcttttatacgctcagggaatcagaggaacacatacttgaggatgaacagcacggtgagcacatacatcagcgggctgatcttcttctccttggccttgccggtgaccacgttgatgatggtccaggagatgatgccgatggcgataccctcggagatgctgtaagcggtgggcatagccagaatggtcaggaaggcggggatgccctcgctgggatcattgaagtcgatcttgatggcagaacccatcatgtagaagcccacaatgatcagagccggagcggtagcaaagctgggaatggtgaggaacagcgggctgaagatggtagccagcaggaacagcacgccggtggtcatagcggtcagaccggtgcggccgccctcggtaacgccggaggcgctctccacgaaggtggtggtggtggaagtacccagcacagcgcccacgcaggtgccgatggagtctgccatcagtgcgcccttgatgttgggcagacggccgtcctcgtccagcatatcagccttggaggccacgccgatcagggtgcccagcgtgtcgaacaggtccacgaacaggaaggagaacatcacggcgaagaagttcagcaggccgacaccggagaagtcggtcttgaacacctgaccaaaggtctcgcccagtgcggagaagtcgaagctgacaaaggcggtggggatgacggagtacataccggcatccacatcggggacgtagataccggtcagctcgcacacgatgcccagcagccaggtgatcaggatgccgtacaggatgccgcccttgacctttttgaccagcaggatggcggtgatgaccacgcccagcagagccaggatggcgcccacgcccacgctgtggaaggttgcgcccttgaagtgctggtaggtgaccagcgtggaatcgctgttgacgatcagcttggcgttctgcaggccgacaaaggccacgaacaggccaatgcccacgctgacggcgctcttcagggtcatgggaatggcattgaagatgccctcgcgcacgttggtcagggacagcgcgatgaagatgacgccctcaacaaagacggccatcagagccagctgccagctgtaacccatggtcagcacgaccgtgtaggcaaagtaggcgttcaggcccatgccgggagccagtgcaaaggggtagttggccagcacagccatcagtgcggtggcaataaaggatgccagcgcggtggcgatcagcacagccttggaatccatgcccgctgcggacaggatgttggggttgacggcaaggatgtaagccatggtcatgaaggtagtgataccggccatgatctcggtctttacatcggtgtggttttctttcaggtgaaagaacttttctaacatgagaaacctcctgcttccaataaaacactccgccggttgcggacggcggagaaagaacagctcccattctatcagctgaaaacgtttttgtccacaccagaaacacacaaatttcgcaatttgttcaaattttcttaaataagtatgacttatcttacaaaaaatctagcatattttagtaatttggacggaatgcaggcgatatgtgcagaaaaaatgtgtgagggaaaaaagtagttccgaaacaccctgcgggtgtttcggaactacaaataaaatattttttacaaattaccggcgcttacagcgtttctacccggtcgaacagatcctttgcggcttccacggcgtccttgctgccaaaggccacccgcacgccgccggacagcacatcagacagggcggcggcctgtgctttgagcagggcggtgtccacgctgcacagcgccttgcggtcggcggcgcgcatctcgtccgtgatgccgcagaagtaccggtgatccagctcccgggcggcggcacgcgccttgcggggcgtgtccagcttggcagcagtgcctacgatgaattcgtccagatcccgggcggtgtagtcccgggcggcaaggacggcaggggcgtctgcgaaggtatcgtagctttcccgcaggtgggggtcccggtaggtgtacaaaaactcgatgccgtcggcacagagcattccggtgccgtaggcaccgcccacctcccggatggcgtgccacaggtattcgtagctcatcacccgcgccagcacccggcggcggctgtcccggggcatgggccaagccagcacatcgtagttcacgccgccgtcaatgataaaggcttcgttcaccgggggcgtcaggggctgggtatagggctgcgccggggtgcgccgggcggcggcaaagcggctttccggcagcagggtgcgcagcttttccagtgcgtcctcggtgccgtgcaggctgacggtcagggcggcagtttgcagcacccggctgcgcacagcatccagttttgcgcccagtgccgcccagtcggccttttccagcagactgcacaggaagtggtaataactcacgccggtgcaggcttcgtccgcagcgccctctacataataatgggcgcgggcgcgggtggaggcaaactcgttgccctgctggataaacagctgctccatgcgcagcttcagctggctgaccacccgggcataggcggcttcggcggcagcgccggtaaggacggtatcgtacagccactcgccgccgatctccaccgccttttccaaactgcgctccagcagactcaggcagagggtcagtttcgcgtggcaaggagcgccctcctgccgtccggtccagagatccagctgggcgcggctgtcgcccagccatgtgctgcgcagggtgttcagctgctgggcggtatgggcgggggtgtccagctcgtccagcacatcggtgagcagattcaggtattgcagctcctccggggtgacagtgccaagatcatagtagaaattcaggtacaggctgccggcagaggggtggcgcagcagggtggcaccggccagctgctcggcgctgccctgcggggtggcatcgcctgcgccaaggtcggcggcggtgagagggtgctccagcaccagcttgccatcggtgcgcaccggggcggcagtgtcctcggccttgggtgcggtgggaatttgcagcacctgcaccggggcgggggcaaacagctcccgcagcagggtgtcgaaccatccctcttccagcttgctgcgcagggcggcaaagagcttatcggtgtgcagcagcagggcggtatcgccggtgtgcagccagccggtggcggcgttgatggcgtccagtacgccgtccggcaggctgcccgggcgctccagcgaggcaaactcggcctcgttcaaagcggccagcagcaggtcgtgaggaatgccggtctttagcagctcgtccacagccttgcgtacagcgggggcaaatttgcgggcagaatccaccgtagcgccgcgcagcagcagctccaaggtgggctgcagggtgctgtcgtcaaagccgatgtcgatatctgcgcccagctgctcggccagcagcgcggccttgaggggggagctgttggtgctcagcagtgcacccagcaaaatctccacacccagctgccgctcacggtcggcaaatgcgccggtgtaccatgccagtgcgcactgcacctcatccggcttgggttggtcggtgtagtagggcagctccacgaatgcgccgggctgttcgtcctgcatggtcaggcggggacgggcagcggccttgggcatcttagacaggtagtccttatccagccgtgccagcttatcggccatatccatcttgccgtacagggtgatgcagcagttgtcggcgctgtaatggcggcggtacacccgctggtatttctcgtaggtcagggcggggatggacgccgggtcgccgccggacacaaagccgtaggcggtatccgggaacatcgcccgttgcagagcgttttgcagctgagcatccggggaggccagtgcaccctgcatctcattgtagaccacgccgctgaccgtgccgtccgcatcccggtgccagccctcctgctcaaacaccgcagagtccaccatagccagcgggcagaacaccgcgttcaggtaaacgtccatcaggttgcagaaatcggtctcgttgggggtggcaaaggggtagaccgttttgtccgggaaggtcatcgcattgaggaaggaagccatgctgcttttgagcagctgcacgaagggggagctgacggggtatttttcgctgcccgccagcacggagtgctccagaatgtggaacacgccggtgtcatcggaggggaaggtgccgaagccgatgccgaaggccttgttgacgtcctcgttctccaccagcagcacggctgcgccgctgacgtcatgggtgagcagggtcaaagtaccgtgctgctcggggcagtcctcggtgcgcaggacggtataaccgggatagtgtgccatttttattctcctttacgggatgtttttcacagaggatgcgcctgcggctcagccgccgaacaggccgaaaaagctggtgtgggtcacgcccagcacaaggaaaagggcaatcagggcgaacagcacgccgatgatgatgtccatctggtgcaccgtgagcgggaatttatcgtaaagcttttccttggggtttacaaagtccttgcggccgttgtccagcaggcgctttttgccctgctcaaaatcggccttctgcgcctgcaattcagcctgctggcgggcaagttctgcctcgcgggcggccagtgcggcctcgcggcgttcaagttcggtctgggtatccggggtgggctgtgccatggaaagtccctcctgtaagcataagatgtttttccttatgataccacaaaaatgtggacaaaaaaagcacccgcagtgcaaagactgcgggtgcaaagggggatgatgaggagattacttcttagccagatacttgcggatatcaatggcgacagccacgataatgacaagaccctgaacgatgtaggtgtaggaggagttgacgttcatgaactgcagagcgaccttcatcagctcaaagaccagaacgccgaccagaacgccgggcacggtgccgacgccgccggtggtggaaacaccgccgatggtgcaggctgcgatggcgtccagctcatagccctgtgcggtgttgacggatgcgccgccggactttgcagccagcaggcagccggccagaccgaacatgcaggaagccagaatgtagatgcggatcttggtagcgttgacgttgacaccggccacctcggcagcagcttcgttgccgccgatggcgtacatatacttgccgtggcgggtcttattgtacaggaaccagaagcagacagccacgatcagggcgaaccagatcagcacgggaatggcaaggaaggtatcctttgccagtgcggtgaagttggagttcagagagccgatgggggtaccgccggtgtacacaaggcagataccgtagaccacctgctgcatacccaaggtagcaatgaagggctgcaccttcaggtagctgaccaccagaccgttgcacagacccacgatggcgcagatggcaatgaccagaatgaacaccacgggggtggacagggtgggcatattgggatagaacttgccggaagcgccttcggtctgcgcaaaaatgcaggcaaggcaggcggcaaaaccagccagacggccagcggacaggtcgttaccggtggtgatcaggcagccggaaatgcccagcgcaatgatgtagcggatggacacgttcttgaacaggttgatcatgttggtgccggagaagaagttggggtgaatgatgccaacgatcagggtgacggccagcatcatcatgataatggcgttgttgctgagccacttgcccacagccttgccattcaattttttggtagcttccacgatagacagcctccttaattactgatttgccgcagctgcgtcaggtgcggtctcgaactgggtagccagcgccatgatgttctcctgcgtggcatccttaccgttgataaagccggtgatacggccatcgcacatgaccatgacacggttggacataccgatgatctcgctcatttcagaggagatcatgataatgctcttgccctgcttggccagatcggcgatgatgcagtaaatttcatactttgcaccgacgtcgatgccgcgggtaggctcgtccagaatgagcacatcggggttgttggcaagccagcgggcgatcagcaccttctgctggttgccgccggaaaggctcttgatctgggtcttggggctgggtaccttgatggccatcttttccttgttggtagccaccagatcgaggatctttttgttgtccagcatgatggggcccttgcgcagggcgtccagagaagcgatggagatgttatcggcaacgctcagcacgcccagaatgccggtagcacggcggtcctcggtcagcagagcaacgctcttgcggatggcatcgcggggctgcttgatgttgacctcttcgcccttgatccacaccttaccggaggtatgggcacgcaggccgaagatgccttccatcagctcggtacgctgtgcgcccaccagaccggcaacgcccaggatctcgccctttttcagctcaaagctgcaatggcggaaggagcggggatggatggaggtgaagtcctccaccttcatcatgacctcgtccgagggcacgttctccagcggggggaacaggttggacagctcacggccgaccatctttgcaatgatctcttccttggtcatgttggcaacgtcccacttgccgatgtactggccatcgcgcatgatggtgacttcgtccgcgatgaccttgatctcgtccatcttgtggctgatgtagaccagagcaacgccctgctccttcagctcccgcatgatgcggaacaggctctcgacctcgtttgcggtcagagaggaggtgggctcgtccaggatcagcaccttgcagttggcggaaacagctttagcaatttccaccatctgcatctgggcgatgctcaaagaacccagctttgcatgggggtcgatgtccagcttcagtttcttcagcagttcatcggtatctttgtacattttggcatggtccacaacagtgacgatgccgtatttcttggtggggtagcgtcccagccagatattctcagccacggtacgagccggaatgggctgcagctcctgatgcaccatggcgatgccgcggtccagtgcatccagcggggtggggatggttaccttctgcccctcgtattcgatctcgccctcgtccatcttgtaaatgccgaacatacatttcatcagagtggacttaccggcgccgttttcgcccatcagagccatgactttgccgggacggagctccagctgagcatgatccagggctttgacaccggggaaggtcttgaccacgcctttcattaccagacggtattctgacattccgcaaaagcctcctttatggttgtttacaggcgggcagttttttctaaaataaggcgcgtgcgcggagaagatttctcgcacgcacgcgctttttagctttcgttcaagccgttaaggcctgctgcgcaccttgcattggttccgggaaactttagtcttccttcaggtactgagaagcgttgtccttggtgaccttgacgtagtcgacccagtagtacttctcaacatccttgccctcgacgaacagcttggtagcctcggcagccttggtagcctgaccaacgtcgtcgttcagaacggtaccggtcatgttgccatcgacaacgttctgcacagcctctaccagagcatcgacgccgaccaggtagacgtccttgccaacggtgcggccagcctgctggatggactgcagagcgcccagtgccattgcgtcgttgttgcagaacacaacttcgatcttgtcgccgtactgagacagagcgtttgcaacgtcctgctgagcggtggtctgatcccagttgtccaggtactcgtacaggcactcgacttccttgttggcgtcggtcagagccttgatggagtactcggtgcggtactgagcatcgatgttctcggggtcgcccttgcacatgatgtaggtgatcttgccgtcgccgttgatatcgccctgagtctcggtctcgaggatcaactcgccctgataagtaccggactgacgagcgtcagcaccgacgtagcagcacttgcccttgtaggaatccagaacgctctcctcgggctcacggttgatgaacacgatgggggtgccggagggagaaacagtatcaacgatggtctgagcggaagtggtctggacggggttgatgaccagcacgtccacgccctgctgcaggaaggtgttgatctgctcggtctgggtgttctggtcgttcttgccgtccatgatggtgacggagtagcccatgtccttcaggtagccttccagatcagcgcggtacagggtcatgaagttatcagcaaactgatagatgcaaacgccgatgttggcagagccgttggtagcagcggcagaagcagcggtggaagaagcaacgctggaagcagcggtgctggtggaggaagagccgccgcaagcggtcatagcagcggtagcgcccacaacggcagaagccttcaggaagtcgcgacgagaaatcattttcataatagtaatctccttcatttgtgtgtcacagcatattcacagacgcatttgtcgcatgcgtccgtaatccctgacagtattatacccttgtatgggggtgttccgcaagagaataagttcacaagattggtgcaaatgttttgttacgtttctacaaaagcggaccaaaggttacaaaatcttttcgcgaattatcacaacttttcatgccgatgcaaccaacatacaaatatgatgaaggtatgtaaaaaaacatgcttgaacatgactgaatgttgcatgactgctaaaaaaccgcgaaaaggggcgatacattttttgaaagatattttcagggatactacacagcggaaagaaaacgccttttatacactcttaccggaagggaaaaacaacacgggtcgagaaaaatgtttactccccgggtggggcggcactgtacctttatagtgatagggcaggcagtgcgcggcgaacgtttttggtggcagtgcccgaaatacgagcggccgttttttgcgtgccgcgccagtcgggataacaaaactgacgaaactgcgttgtgtcttgaaagtgtaaaatatacaacaaggaaaacaactgcacaaaaatacccgatggccctgcaaaagtgcacactgtcgggtgcggcgggcgggtgatatcctgtgtacagagcccgggacaccggacgaaaggaggaagaacatcatggggcagacaaagcccgccgccgggctgaagagcctgaaccgcgccgccgataccctgagcaccctgctggcgcaggaggtgaaggagctgaacgagcggcagaaggccgcccggcgggagaacacccccgaccccgggatgatgaaggggctgaaggaggctaccgccgtgctcaaggatctggcgggtgtggtaaagaccctgaacgatcagggcacagagctggaaggaacagagtgcggcgtggtgctgctgccgccggtggaacaggaggagaaggaatgaacagaaccgagcgggcagtcattgtgtggaagccgcagccccggcagctggaatttatgcgcagaccggagccggaggcactgtacggcggcgcggcgggcggcggcaagagcgatgcactgctcatcgaagcgctgcggcaggtgcacatcccgcattaccgggcgctgatcctgcgcaagacctacccacagctttccgaccttgtggataagagccagatgtactaccgccgggctttcccggaggcgcagtacaacgctacctcccatgtatgggtctttcccagcggggcgaagatctggtttggctccatgcagtacaccaaggaccgcaccaactatcagggcaaagcctacgattttatcggctttgacgagctgacccactttgagtgggacgagtacagctatatgatgagccgtaaccgccccaccgggccgggcacccgggtgtatatgcgtgccaccaccaaccccggcggcatcggccacggctgggtgaaggcgcggttcatcacccccgccccgcccggtacacccattgtggaaaccgtcacggtgcgcctgccggacggcaccgaccagcagatggagcgggcgcgggtgttcatcccgtccagcgtgttcgataaccctgccctgctggccaacgatcccgggtatctggcaagccttgccagcctgccggaggcggaaaagcaggcgctgctctacggcagctgggacagcttttccgggcaggtgttcaccgaatggcgcaacgacccggcgcattatcaggatcagcgctggacccacgtcatcgcgccctttgccatccccaagcactggcccatctggcgcgggtacgactttggcttttccaagcccttttcggtggggtggtatgcggtggacgaggaggggcggctgtaccgcatcaaggaactgtacggctgcaccggccgccccaacgagggcctgcgcattgacccggtagagcaggccaagcgcatccgggaagctgagcagaacgacccgctgctgcggggcagggtgatccacggagtggcagaccccgccatctttgacgagagccggggcgagagcattgcggccatgatggagcgcagcccgcattttttgcactggcagcccggggaccacacccggctggcaggtaagatgcagtttcactaccggctgcggttcgcaccggacggacggccgatgctgcaggtgttcagcagctgcaagcacttcatccgtaccctgccaaaccttgtgtacgacgagagcaatgtggaggatatcgacacccggcaggaggatcacatctacgacgagtgccgctatgtgctgatggagcatcccatcagcccgcccgaggcctctgccgcgccgccaaggccggacgacccgctggaactgcaccggcaggcgcggttctaccgcatctgaaaaaacaggacagaaaggaaagaactatggaagatacaagagcagagagcctgcccatcggcgcggcagaggcggcagctgcattgcagacgctgcagcgctacaaggcgggcaaggcggcgctggacaagcgcctgatcgataacgagctgtggttccgcatgggacactggaaaaactaccgcgacccgctgatgcccggcaaggcgcagccttccagcgggtggctgttcaacagcatcgccaacaagcacgccgatgccatggacaactaccccgagcccatggtgctgccccgggcggcagacgaccaagccacagcgcaggcactttccagcgtgctgccggtggtgctggagcaggcggattacgagcaggtgtacagcgatgtctggtggcgcaagctcaaacagggcactggcgttaccggcatcttctgggacccggcggcgcgcggcgggctgggcgacattgcggtgcgcagcgtcaacctgctgatgctctactgggagcccggcgtgcaggatatacaggactcgccggatctgttccacctcagtttagaggacactgcccggctgaccgcgcagtatccgcagctggcggggcacgccgccggggtggtggacgtgccccggtacatccacgaggacggccagaccaccgccaacaagagtgtggtggtggactggtactataagcgcccggacgagaacggcaaattgcggctgcactactgcaagctttgcaacggcgtggtgctgtatgccagccagaacgacccggcgctggcggcgcgcggcttgtacgaccacggcaagtacccctttgtgttcgacccgttgttcgtggaggaggattcccctgccgggttcggctacatcgacgtgatgaaggactgccagaatgccattgataagatgaaccacgccatggatgagaacgtgctgctggcctcccgccagcggtatgtgctcagcgataccgccggggtgaacgaggaggagcttgccgacctgagccgggacatcgtgcacgttgtgggtcgcctaaacgaggacagcttccgtccgctgcagacggcgggcttgcagggcaacagcctgagctaccgcaacagccgcatcgaggagctgaaggagatcagcggtaaccgcgacctgacgcagggcggcaccaccggcggtgtgaccgccgccagcgccatcgctgccttgcaggaggcaggcagcaagctgagccgggatatgctcaagagcgcctaccgcgcctttgcaaggcagtgctaccttatcattgaactgatgcggcagttctacgacgagcagcgggtgttccgtatcaccgggcagcgcggcgagagcgaattcgtgcccttctcggcgcaggggctgcgcgcaaagcccgtgcccgccgtgggcggggtggagctgggcagccgggagcctgtctttgacatcgtggtcagcgccgccaaaaagagcaccttcagccgcctgtcccaaaacgagaccgccaaggagtgctacaagctgggcttcttcgaccccgctaacgcggatgctgcccttgcggcgctggagatgatggactttgaaggggtggaaaaggtgcgcgcccgggtgcggcagaacggcacgttggcgcagcagctgttgcagctgcaagggcagatggcaagactgtctgccgctcttgcgcagcagcccggcggcacccaaacggcgcaggacaccgccggcctgacggcacagctgccggtggcggcggctgcccgcgccatgaactggaacggaaaggaggcgaagtgagatgatcaaggtatgttacagcgagctggacggccccaaggggctgagcctgcggctggaagccgcaggtcacgcgggctacgcgcccgccgggcaggacatcgtatgcgctggcgcaagcaccctgatgcaggcgctggtgtacctgctggcaggggaggagagcgcccgcagcgatgcctgggacgagccggagggcccgcgccttgccgtggcggtgcaggccccggtagcaccgtgggtgcagggtgcatttgaactggccaaggcgggctttaccctgctggcagagcgctacccggacaatctgcgctttgcggatgtgagccgcagcggacagcagagcatgatggacttgcagctgtttgcggagggggaagccgcacctgcgttgagcccggcacagagccgacaggcggtggctgcgggcaccctgaagccggaagccccagccgcgcagccggaagcgcctcagcagaccccggcagagccggagccgcagccggaaacacccgcacagccggagcgcccggtattgccgcccctgccgctgccggtggaaaacacggtgcacagcctgcacgcccgctgggcggcagaggaagcggccatgcgccgcagccagccgggttttgacctgaaggcagagctgaagaacccggagatgcgccgtctgatgcagctgcccggcatgcgggtgcaggacgcctaccgccttgcccactacgaggatgccctgcgcaccacggcacagatcgtggagcagggggtagtggagcgggtgcagcagcgcgctgcgcgtccgctggaaaacggcctgcgccccggcgctgccgcctcggtacggccggacgtagccgccatgacccgcgcccagcgggaagctttggagcgccgtgtgctgcacggtgcacagatcgaactttaacctgacaggagaaaggaaaaaagcatgatgaattttaacatccagctgtttgcggacgcgcagaccaacaccaccggcaccatgtcggtggagatgaagaccttttacgagaagcgcctgatcgatcaggcggagccgcgccttgtgcacgaccagtttgcggattactaccctgtgccccagaacggcggcaagaccatcgagttccgcaagtacgacagcctgcccaaggccagcaccccgctgaccgagggcgttacccccaacggtcaggccctgaacgtgaccagcatcaccagcgacctgcaccagtacggcggctggaccccgctgactgatgtgctgcagatgaccgccatcgacaacaatgtggtgcaggccacccgcgtgctggcaagtcaggcaggccgaaccatggacagtatcacccgcgatgtgctggcgggcggcaccaacgtcatctacgccccgaagctgggcgcagacggtgccgagaccgccgttaccagccgcaaggcgctggacaagagctgcaccctgaccccgaagctgttctttcaggcggcagcgcagctgggcgcaatgaacgccgaccccatcggcgacagctacgttgccatcatccacccctatgcggcctatgacctcaagacctgcaaggagttcatggaggtgcacaagtacgccgaccccgacaccatgttccgcggcgagatcggcaagctgggcaacatccgctttatcgagaccagcgaggccaaaatctggaaggacgacacctgcccggcgggtcttgcggtgttcggcacgctggtgctgggtgcccacgcctacggcgtgaccgagctggagggcggcggccttgagcacatcgtcaagcagctgggctacggcgacgacccgctgaaccagcgcgcctctgtgggctggaagggtatgcgcgccgccgagcgtctggtggaacagtacatggtgcgcatcgagagcgtgtccagctactctgccaccgctgccgccaactaaggaggtgcctatggctgaaaagaatgtgcgcatccggctgttcaaggacaacagtcgctacaagggcgatctgttcgtcagtgtcaacggcgtgaactacaagatccgccgtggcgtggaagtggaggtgccgcccgctgtggccgaggtgctggagcacagccagcgtcaggacgagctgaccgctgcccgcattgccgctgcggagaacgcggcgcagtaaaataagcactgcccggctgggagaaatgcccccggccgggctttttataaaaggatgtgatgagatgaccataggagaggctttggagcgtgccgagcagctgcgcccaaactgccgcattgaaaccgagacccggctgcaatggctgcgggaggcggacgccctgctgcgcacaaagctgtttgaccgcgccgccgccggggcgtttgacgccgtgggcgcagaccgtccgtgggagcagccggtgcaggacgaccagacgctgctggcaccgccgccctttgatgccctgtacccgcacctgctgtgtgcgcagatggatgccgccttgggcgagaccgaccgctacgccggggagcaggcgcagtacaacgccctgtatgcagagctggcggtctggctgcggcagaactacccgccccgcagccgggcgcagtggcgctggtaaggaggtgaagtgatggtactggcagacagaatacggcttgccaacacccggcagctgctgcgggcctttggcggcctgaacgagacctacggctgctcggaagcagagtacagcgccggagtgaatttttccacccgggatttccccgcactgagcacccgaaccccgcgccgcagactgcgggcactgaccgggctgaacgggatgtaccacctgaatggtctgctgaccgtctgcggacgggatgtcgtttataccccggacgatgccgccgccccggcggtgacgaagccggacgccgtgacagacggccgcaaggcgctggtgggcatcggcacaaaaattctgatcttcccggacaagctggcctttgatacggcagacagcagcgtgaccgcactgggggcgctgtggacggcggcgggccaaagcgtgacctttgccccctgcgatgccgcaggtaagacctatcaggtggaggcctttggccgggaggagcccgccgaacccgcagacgggcagctgtttttaaaggtagaggatgccgaccatccgtggcggtacgacagcacgctggagatgtacagcaaaaactccggcagctgggcagccatcccgctggaatactgccgcatcacggcggcagggctgggcaagctgttccggcagtgggacaccgtgaccgtgcagggtgcagccgccgaagcggcagggcagagcccggagctgaacggagatcagatcgtatatgacgtgggcgaggactggctgcgggtgcgctgcaccccgcagggcgcgtatttctacggtacactggtgcagaacgccgccgccgcccagtggcagagcatggacggcaaacagcaccgcagtgtggaagctgcgcagacggtatccatggagcgccgggtgccggagctggattttgtgaccgagtgtgacaaccgggtgtggggctgcaacagcagggagaacgttatctacggctgcaagctgggcgaccccaccaactggttcagctaccggggcatcgccgcagacagctacgccgtcaccgtgggcagcgacggtgcctttaccggggcagcttcctgcatgggctatgcgctgttctttaaagagaacaccctgcacaagctgtacggctccaagccttcggattttcagctttccagcctgcgctgccggggcgttgccaaaaacgccgcccgcagcctgtgcgtgctgaacgagacgctgtattatctctcgccggacggcgttatggcgtgggacggcagtctgcccaccaaggtgtccggtgcgctggacgctgcaaagctttccaacgtgcaaagcgctgtgggtggtgcgctggatggccggtactacctgcacatctcccgggagagtgcgcgtctgttggtctacgataccgagaaggggctgtggagcgaggaggacgtctgctcctgcgatatgaccagcaccggcgggcagctttatctgtgggacggacaggcgctgtgggcagcagaccccacccgcgagccggactggcaaaccaccgacggcgtggaaacggacatcccctttgagctggtcaccggcgatgtggggctggacggcaccgagcagcggtacctctcccggctgactttgcggctggacgctgaatgcaccagcacagtagaagtggcggtgagctatgacggcggcgcgtgggagacagtggcctcccttgccgcccaaggcagccgccgcagctatgacctgccctttgtaccccggcggtgcgggtcgctgcggctgcggctgcgcggcaaagggcagatcaccctgcgcggacttgtgcgcaccatcgccccggcaaaggggaaattatgggaggaggatgcctcatggcaagcatgaacggcctgagcaagctgggcgtgcccaagttcagcgatcacatggacccggaggatgcccgggcactgcgcagctatctgtaccagatgcaggagcagctgcagtatgtactgaccaatctggatacggaaaatatgtccgacaccctgcgcagcaagctgcagggattataagaacgaaaggagaattatatggcatccaaaaagaaggaggaactgctgcagccggaggtgcaaacgcaggcacagcccgctgcgcagtccacttacagcgccgaggggctgaacagccgcgccgatgtggaaaaggccatggcaaacgtcagctaccgccccggtcagcaggtgaccgatgcggccgacgccctgaagcagtggcagcagaaccgccccgcagactaccagagcagctatcaggataagatcaacagcctgctggggcagctgctggagcgggagaattttcagtatagctacacccgcgacccgctttaccgccagtacgagcagctgtatacccagaacgcccacaatgccagcgcggacgcggcggcacaggctgctgctctgaccggcggctatggttccagctatgccaccagtgcggcgcagcaggcctatcagcagcagatcggcgggctggccagcgctatccccaccctgtacaatctggcgctggatacctaccagagcggcggcgaagaactggtgaaccggctggaccagctgaacggacaggagcagaacgcccagaccctgtacgaccgtcagctgcaggactactacacccaattgcagcagaaaggcgaggcttacaacgacgcctatgccaaagactacggccagtatcaggagcacctgaaccggctggacaccctgcacggctactacaccgcgcaggagcaggcggaaatcagccagcgccagcaggcgttcaataacatcatgacggtgctgggggtcatcggggacgtggtgcagctggccattaccggcaccaccggtctgggcacgctggcgggcagcctgctgaacaccgggtacaacatctactccggcaaccgcgcctacgaggccgagcgcgccgacacccagtggagccagcagatgcaggagaagcagcggcaggacgcactgacccagcagcagtacgacaacaccgccagcgagcgcgcctatcaggacgcgctgaagcagcaggccttcaacaacaatgtgaccacccagaagctgaacatcgccaagggcgagtgggcactgaagcaggctaacgcccggcagaaggccgcacaggccgccagcaaggcagcggctgcgaggacaaagtccggcagctccagcagcggaaaggccaccggcagcagcggttctgcctccggcggcagccgcagcgccgtcagcgccggggtaccctacacggcagcgctgctgcgcagtcagggcaagaacgatgtagccatcacctccgccctgcggcaggagggctatacccccgcccagatcgcaaagatcatacaggagatgaataaataagagaaaaggcaccccggcaaagcagctgctttgccggggtgccgtactttttgtagtatcctgccaaaaagaaaaagtccactgttcaaaacagcggactttttggtggggtgcccagtgggactcgaacccacggtctccagatccacaatctggcgcgttaaccgactacgctatgggcaccacatagatgcgcccgaagggactcgaacccccggcccactgcttagaaggcagttgctctatccacctgagctacgggcgcacgttgttatcccaatgggttccattatggcggcagttctgtgtcggcacaggctgcgagtgaaataataccatacccatcgcattctgtcaaggaaaatctgaaaaaagtttcaacttttttgcgctgcgggcaaaaatgaccgttccagcgtgtaggaatggccttacagcagccacattccggcacagcccagcgcaaagcccagtgcaaagccgcacaccacgtcccgcacatgatgcaccccggtgagcacccgcaggcagcagatgagcagggcaacgcccaccatcacgcagcccgcagcggggtagaaatacagccacaccgccgccagcacggcggcgctcagcgcgtggcgggagggcatggagtgtccacggctctcctttgctaccagcggggtaaagccgggctgctcgtaggggcgggggaagtgcagccgactgcgcagcagcgtgccgccccagaacaccagccccggtacaaagacggagcgggcgatgagcaccataaagtccagcgcggcctgcttctgggtgaggaacagccgcgagagccggatgttcagcaggcacagcagcaccggatagcacacaaagggcaccagcggcagccaccggtccagaaaaacgaccagccgctttacggccggatgggcgctgaaccagtgatagatgggcttatactgttctgcggtcaaagcaactctcctcctgtcgggacggacatcagaaacaggtgtccagatagttttccacatcaaagggctccggagtggaatccttgcgcagatacagcgggtggtgcgggtgtccctttttgctgcgcttgccaaaggtgacccacgggatctcccgctcccgcgtcagagctaccatctcccgcatcagaccgggcaggtagtcccgcttttcgatcagggtgccccatgccgcccacatggtgggctcggtctgtgccagaacggcctgcagccagcgcaggttttcatcgcacagggcgcggtcgggggtcttgtccatatcgttggggtcggtggcgcgctgggggtagacgttgaacatgatccagctgtcaaagccgttggcggcggccagccgctccacactttttaaggtggggtccagcgcaccgggctgggcggtactgggattgatgccgatgcacaccagcgggtgcttgcccacccgccccagaacgtaacggtagctttggtaggtgtggggctcgtaataccagatgccgccggcgtattcgcccgcctcgagcacgggcagagaaatggtctgcatgatcgtaaactcctgtcggttttgaatatcattcttatcgtacctgaaaccaccgggaaaatcaacagttttagccccaaaatactgccttatttctgtttttgtggtatactgggggtgttccggtgcggcagggggactgcggcaccgcgcttcgcttacagaaaaaaggagttcttatgctggaagattataaaagtgcactgcgcgcagggcagcgcgcctatcgtgcccgcatagcccgcggccagtcgccctatctggctgttctggacgatgtgctcaagggcgtggatatcgtggcgcaggagccgctggggctggtggagatcccgtcggacagtcttgtgggcaccaagaccagcggacggcacactgccttttcgtatgactttatgcccttgctggagccggataccgagtttgctgccaagtggtcgaacctgtgcgacgcgcatctggaagagggcatccatactcccatcatcgcctttgagtacatgaaccggttctatgtgcaggagggcaacaagcgggtctcggtgctcaagtattacggtgccgtcaagatcccgggcacggtcacccggctcatccccgcccgcaccgaggatctgaaaaataagatctactacgagttcctggatttctataagctgtccaaggtgaactatgtgcatttctccaagctgggcggctacagcaagctgcagacgctggtgtgcaaggccagcggcgaggcatggtcggaggatgaccggctgaactttgccgccttctacaccatgttccaccagcagttcgaagccttgggcggcagatccctggggctgaccaccggtgatgcgctgctggtgtacctgtcggtgtaccgctactccgacacctacgacgccaccccggcgcaggtacggcagaacttggaaaagctgtggaacgaggtgaaggtgctcaccgagccccacggcgtggagctttcgctggaaccgcccaagagccccgcagagccgctgctgtccaagctgaatatcttcagccccagcaagcagcccagcgagctgcgggtggtgttcctccacgagtacaacgccaagatcagcgcatgggtgcgtgcgcatgacgaggggcgcgatgcgctggccaaggtcttcccggacaaggtgtatatcagctgctacgaggatgtgaacccggaggtggacgcggagcagatattggaggaggtagcccacaacaatgcggacgtggtgttcgccaccagcgtgcggatgtacaacgcctgcctgaaggtggcggcgcagcaccccaagacccgcatcctgaactgctcgctgaacgcgccgcacccgctggtgcgcacctactacccccgcacctatgaagtgacctatctgctgggcatgctggccggtatcatgaccaagaccgggcacatcggctatgtggcggcaaaccccgtgtacggcgtgcccgctgcgatcaacgcctttgcgcaggggctgaagagcgtgcgcccggcaggccgtatctggctgcgctgggcctgccagcccgataccgcccatccgctggattttgccgactgcccggagatcgacatggtctacgcccgggacagtcgggagcctgccgacaccaaccgggactacggcctgtgccgcaaactgccggacggcagcttacagccgctgggtctgccgatctggcggtgggataccttttatgtgcagatcgtgcgctccatttttgacggcagctgggacaatgcagccaccacccgcgcagtgaactactggtggggtctgcgcagcggcgcagaggatctggagtatcaggaagcgctgcccagcggtacgcggcagctgctggatctgctggaaacgctgcagggctcggacaatgtgcacatcttcccggagaagctgtatgataacgaggacaacctgcactccccggagaatagagtttacagccccaaagagctgatggagatggattggctggatgcctgtgtacacggcaagctgccccattacgatgaactggacgtcaagacccgtaccgtgctggcgatcaacggactggacaacgtaaagggtctggagaaatgagccggcccgaccggaaacagaatggagcatacgaacgtgaagattcttgccatttcagatgtcccgtccaaggcgctgtgggactatgacacccgcgcccggctggaaggcatcgacctgatcctctcctgcggggatctgcccaaaaagtatctggaatatctcacaaactttaccgctgcgcccatcctgtatgtgcacggcaaccacgatggcagctaccagactcagggggaacccggcggctgcatctgcgtggacgatcaggtgtacacatggaaggggctgcgcatcatggggctggggggctgtcagcgctataataaagaggatacctaccagtacaccgagaaggccatgcgccgccgtgtgcacaagctgaagcatcaggcgcacaaaaggggcggcatcgacctgctgctgacccacgccccggccaagggactgaacgatggggacgactgtgcccacaggggctttgagtgcttcaacgagattttggacgagtaccagcctaaatggttcatccacgggcacgtacacctgaattacgatgcaaagctgccccgggtatgcacccgcggcaacaccaccgttatcaacgccaccgagcgctatgtgttcgagatcccggacccggacccggccgaagagcgtaagactctttggcggatgctggggttctgagccgctgcctatgtaaaaaagacaccgcacagctgtgcggtgtcttttttgttgatggaaccttattgtgggaatagcgggcgcggcagcagtgcggtgctgcctgtgaccctgtgaaaaattacagttccagcttgccggagaacttattgatgacgtagtaggctgcgccttcctcgggcttgacgtacaccttgcaggactgtacgccgaccttgtgggtggtgcggtagtctgccttggcgcggtcaatgatgtcggtgatgttgtactgctcaccgcccatctctacatacagctcgggtgccagcggcgggcggccgcggcgggcgggagccttggtggatttgcgggtcttgccctcggcagccggagcatcggctgcgggagtagaaactttcttttcaggcatgatgcataaccttccttctgtatttgatctggtgcagcggggctgcaccggcgggctccaatgatctatcgtaaggcagaagcagtgcaaaaagcacagacccggctgccctatacgaaccggtacgaaactatttgcataaagaagttgaacctataattatataatacgtttttgaaattcatttgtaaagccttttttgcaaaaaacattgtaaaatcggtaagaaacagcggaataaatggccggagcagccttccggtgctttttcccgggcagagtacgacttttcggcaaaacgaacggccattcccgggaaagcctggccacaaatgcggcgggcaaaaacgaccttctgcgggggcagaataaggcggaacggaactgtcggcacgcgcaggggcgcagcagataaaaagcagaagctgccgcaccgtatttttgtgcggcagcttctgcttttcggttttgatatgtacccccaatactgggtgtccagtattgggggtacatatcatttttgcttattgctcagtctgtacacagaacagcattcccggtgctttcaatttgtttagcgatcatgctttccagttcctgcgtgatggttgcacaatttgcaacacggtaattccagaaataagaaacaccttcgcactcttccacggacaaatcgctattgaccaaaagcaagctttctggtgtcacgttcagcttttcgcacagagaagcatattttccataatcaatgcttcggctggaggatttggcttctacccagaaaaattttccattgatggagaacacgacatccagctcatgcgtgctccctacggatgccgtttctgaaagaaccacattggagcaaaccgaaacttctgcgccctgctcctcccgatagcggttcaggatctgctgaacctgatgctctacaaaaagctccagccactttccgctcaaaaaatgtcggacggtttcattttgcgcaagttcatagacgatattctgcggatagatcacaatggctgcaaaaagccccattttgtcccacgtctgagcaatctctgaaagtgtggcaaacgattttttggacgcaccctttgggatacggaacgaaaaagaaccgtcgctctgcatatgtgttcggataaactgcaagaaatccaccaccaccgggtcgcaaagagcctcgcctgttttccatgccatccgctgaacagcaatcggtgggagcttttccggcacgacctgctgaacgattttatacccacagcgttccagatgctccaatgcggtcaaaggcttctggatttttgctttgacttcgggcttttctgctccggatgtattctcggtcagatagttgaacttccatccgtattcccaagcgggcgaacgggtcagtactccgaccgcatgaaatccgctgtcatgctcctccatcggaaatgtgaacttgttcttatgaatattgatttggagtgttttgtttttcagtgctttctgataagcgtcaagaaaaaattcctttcccttatacgccagctcactggaattatttgcagaaagaccagcattttttgccaaagagaggagcagacaggtcgctttgggcagctcaaggatctgttccatctgcgcagcgtccggaatatttgcattatcggactgcgacgattcgtctgccggaatctcctttgctggtgcagaaacctcgggcgtcttttttgaagcagtctcagactttccagatttgggcaagggctttggctccgtgtaaacttccgcaatgaatgattcataggaatcgatgcacggaagttttccagcggctgcaagtcctacatagattgcagccgcccgcggggaatcgccataatactttttagaatccgctgcggcagcaatatcagaaaaggcattatatctgctcagctgcgcagccttttccgggaactgcttcaacgcacggcagtagagccactcaaaaaatgaatccggatgcggctctatcggatactcacttccttccaaagagtagcgtagcagctttccattggttcgcagccgagtgtccttatggactttggatggcgcacaggtcagaaggtcagcgaatggaccgccatgttcaaataccttggcggcttcaaaaaccgtgctgatgggcacatcctgcgcaacagaatccagacgcagcagaagccgcagagaagaaacagcctcaccctccggctgaacggatgcagagctgacttccagaattgaaacatccgggtctgttgtatggacggcatcatggacggcacggatattctgccgcttgctaccttttatccatgtgaatgtcaccggctgttctttgcaataggggtagccggatatgggaaaacaaatggttcgtgtagccatgaacacctccaactttttttaggacgaacaggtttgtgtaaatcaagtatagcacaatcccggatgtgctgcatagcactattttctgcttccgggaatctatctgtgcaaaaagtgccgataccacaggcatcggcactcagatcaaaaaagcattttgcaaaaatgcgcagcctgcatccaccggatgcagaacacaaggggtttgggcacagcccaacaagcattttgaatttggattttgaaaaatccgattcaaaaattgcaagttggtaccaagttgcactgcttgcgacgtagatgtttccgtcaactgctgcgtcagaaattttaaatcacttcagctttgcgaggatatcgtctgcgctcacgccgcttgctagcagttttttcagaacatcctctgcttcggctttctttgcggattccgcggctttggtttcggccttgacctttttagcctcgattctggcaatttccttgtcgatagattttagctctgccttcttggttttcaggtcagctttcagagcatcgatgttcgcagtgatggatgcgatttcagcggcagcggcttcctttgcagactgcttttcggcaatctgtgcagcaaagtcaacggttgcttttacggtcttggtcttgttcttgcttcctttgggacggggcataggggacacctccaatgttttttgatggtttcagtataacacgcgttttttgtgttcgcaagaggtgcattttgtagaataaaaatatatctatgagtgaaacaataaatcgattttggaatatgcaccggcgtgggttgccaacttgttgggatgtatctcccgctggtcgtagaactgttcaaagcgtttggcaacggcattgtttacagtcgtgatgaagttcacctcactatgatgttacagaaatccgtgcagctatgcatacgcatctgcgtatgatgcaaaagtattttatgatacagagaatgtgcagccgcgtaatggcaaagaatatatttaataaaaaaagtatcctccatagtgataatggaggataccaatctttcgacatcgttgtttgaattcttctcttattttatcatggttatatctgggaatcaatagaaatccttacaaatgcatcccgcctgaccttagaaaaaaactcgcagaagctaaaagttttttgcacattgcccagttctgcatgaaaaatccagcaaaaaacgaaggtggacagaataagtggtcagaagggtgtccaagacgcaggaggaaacagaaatggcacgacggggagaaaacattcacaaacgcaaggatggccggtgggaaggccgctacatcaaagcgcgtacaccggaggggaaaatccagtggggctacgtctatggcacggtctatgctgaggtcaaacgtgtgctgattcaaaagaaagcagaggcaggcttctacaatctaaagagaaccgacctgacctttgaagtactggctgaggtatggctgcactcccagcggaatgcagtaaaagaatccacctatgcgcattactcgtacacgctgcacaaatatcttcttccggttttgagtaaagtgcccgttgcatctcttgaggaaagttttctggaacaagctatgcagcagatcatcgcgcccatagatgccgcacacaagccgctggggaactcctctgcccgggaatgcctctcgatgctgcggcgcatctgcaaatatgccgcgcacttgcgcctgatccgcccgatggagttggaagtagcgttgcccaaagccatcgaccaaatttctgcgcctctctccccggcggagcagcagcggctttatcagtatgtacaggagaacccaacgccccgcaaaatcggcttattattaggggtggaattggggctgcgtattggcgagatttgcggcttacagtggggcgatttcgacctgaaactcggaacgctgaaaatcaaccggacggtctgccgaatttcctgtgaaaatgggcatacaaaggtggtcatccaaacgcctaaaaccagcacctcccgccgggaaattccaatcccaaagcagctgcttattatgctgaaaaagctgcgcggaagcgccagtaattctacatggtttctatctggcaacgagtccaagcccaccgagccccgctgctaccgaaaaagcatcaaatcatatctgaaacaggcaactgtccggcaggtacgtccgcacgcgctgcgccatacctttgcaacgacctgtctgcaggcggggtgcgatgtaaagaccctcagcgaattgttaggacacgctaacgccaacatcaccttgcagcgctatgtgcactctgacctgacccgaaagcgccgggagatgaaccgaattttctcccatcaggtgttcatgaggggcgggaacacgctaaatgtgacgtagtggcgtatgatttctttgccgttcctccattatcactgtggaggatacccctttatgcgggaaggggtgaacaaggtggcattgcgtctatttgagcacaacgagaaagcatatcatgcggcagtccggatgatggaccagtatggcaaagctgccattgttcatcccaccggcaccggaaagagctacattgcgttcaagctgatcgaggacaacccggagaaggtcgtgatctggctttctcccagtgaatatatctttaagacccagctggagagcctgaaaaggaacgacccggattttccgctggcaaacgttcacttttatacctatgccaaactgatgtgctgcacgcaagcgcagctggacgaaatagcagcgcagaagcctgcctatattatactcgatgaattccaccgtgccggtgcggaatgttggggcgaaagcacggtggctttattaaagttatgcccggatgcaaagcttctggggctgacggcaacaaacatccgatatctggataataaccgcgatatggccgaagaacttttcgatagccgtgttgcgagcaacatgacccttggcgaagcagtcgtcaggggcattttgcctaccccgaaatatgtgaccacggtctaccagtaccagaaaacgcttgcaaagtatcaggcacgggtggacaacctgcggacaccgggcattcaggatgtgaaccagaaatatctggacgccctgcgccgcgctttggaacaagcggatggtctggatagggtctttgcacatcatatcacgaataagactggcaagtacattgtgttctgcgccaacaaggagcacatggacgagatggtgtcccatgtgccggagtggttcgccggggtcaacccggatgtggtggtgtatcaggcttactcggatgacccgaacaccgacaaggcttttgcggacttcaaaacggacaccagtgaccggctgaagctgctgttctgcatcgatatgctcaacgagggcgtccatgtagagggaatttctggggtcattctgttccgacctaccatttctcccattgtttacaagcagcaaattggccgcgccttgactgccggggacaccgcagccccgctgattctggacgtggtcaacaactttgagggcttgaccagcatttccggtctgcaaagcgagatgcaggaggctgttcatcggctctacgccaacggcgaaggcgataagatcgtgaccgagcggttcgaggtcgtcgagcaggtgcacgactgcctgcagctgttcgaacagctgcaggcgagcctttcttccggctgggagcactacttctctgaggcgagcatctactatgcggagcacggcaatttgaacgtcccgaaactgtataccacgcccggcggtctgagccttggggtgtggctggtgacccagcgccgggtgcgtgaggggcagatccaaggcaatctgaccgagcagcagatcgcgcggctggacagcatcgggatggtctggggcaaccgaaaagaaatcgcgtggcagcatggatttgaggtcgcaaagaaataccacgacacctacggaaatctgatggtgcccggcaaatacaccgacccggacggctaccctttgggacagtggatcatcaagacccggcagcagaagctcaatggccgtttgaaggaagaacgcatcgcacagcttgatgagatcggcatggtgtggaacattttcgatgctaagtgggaaaaagcttatgcgctggctgccgcctattatgaggaaaacggcaacctgaatatcccgcgttcctatgtgacagcggctggcgaacggctggggcaatgggtcgcaagccagcaatgggcgtacccaaaaggaaagctgacagacgagcaggtcgagcggctcaaccgaatcgggatgtactggggcaaccgcaatgaccgccagtggaacgaaggatatcaggaggcgaagcgctactttgatgcccacagcgacctgaacgtccctgccgattatgtgtcaccgaatggatataatctcggaaattggattaagcggcaacgctatacccgacagaatcccgaaaaaagctgcgctgtcctgacagaggagcgtattgcaaagctggatgccatcgggatgcggtgggagaaagcggattcgaggccgcgccggttagaactggcacaagaatctaagaggaaaagtgaaaacctgaatgtttcggctaaccacaaaacgggggaagagatcggtttgtgtagttgatagcgcgatccaaagcacttgttgcaatttgggtcggagaagttacgtgagtcgtaaaaagaaaatctaaaggagttattggagaggattatgtcaaagtttcagcatgatgtgatgttgcggattgtaaaaatcttgaatgttctgatgatcgagttgccgtttgcggcctgctggttcctgtactactcgcaccagacctatgcaaatctggcatgggagggtcattttgcgattttaggcctgttttttatcctgtacattgcactcggtaaaatctacgatgcgttctggatgtcgatgcagcgggtctcggagctggtgtacggccagatccttggcgcgatggcaaccgatggcatcttgtacatcgtgatctgcctgatgtcggcaaagatttgcaacctgttgccgggtattgcggcaatcgtgggacagctggtgatggccgcgatctgggcatcttgtgcacataaatggtactacaagaccttcccaccgcagaagaccgcagttgtctacgatgtacgtcatggtatggaaaagctcatcaacgagtatggtctgaaccagaaatacgatgtgcaggtcaccttgagcgtgtcggagtgcttggaagacctgagcattctggacggcatggagactgtttttgtcagcggtgttcacagccatgagcgaaacattatcttgaagcactgcgtagggaagggcatcaatatgttcgtcatcccccgtgtgggtgacgttatcatgagcggcgcgtggcccatgcatatgttccatctgccgatgctgcgcgtcgggcgttacatggctagcccggagttcctgttcgttaagcgcgcgatggacattgtgatctcgctggtggcactgatcatcctgagcccgctgttcttgatcacagctattgcggtcaaatccgatggtggtcccgccttctacaagcaggttcgcctgaccaaggacggcaagcagttcgagattctgaagttccgctccatgcgcgtggatgcagaaaaggatggcgtggcacgtctttctaccggcgacaaggatgaccgtattacaaaggtcggtcacattatccgcgcctgccgtctggacgagctgccccagttgctgaacatcctgaagggtgacctgtctgttgtgggtcctcgcccggagcgcccggagatcgccgcacagtactgtgaggaaatgccggagtttgcgctgcgcttgcaggctaaggctggtctgaccggctatgcacaggtgtacggcaagtacaacaccaccccctacgataagctgcaaatggatttgatgtatattgcgcatccaagtctgatcgaggatttgaaaatcatgctggcgaccgtgaagatcctgtttacgcctgaaagtaccgaggggatttctgagggtcaaaccactgctatgagtggagaaaaccactaaatatcgacgcttttgtgcattttaaactgttaaaaattggaaaaaattccagagtggtgtcaggcataaatgcggctcttacagtagcgtcaagctggaaagtcggcataagcaaggaagctactgtggcatggatgagcggaatctggaataagcacacgacttaccgtaacgagtgttggtgctatcaggactaaagacagaagctaccgtagcgtaaatttgccgtagcaacgtttgttgcgacggtacaagacatagcggcagtgtgactcacactgctgaggacgattagtagagctttataaggaataaacgactcagattcttggagaatgagtctgggctgtaatctttgatatgcggagagggactatgagtgttgtgggatacagaggatactccgttcttatgtcggtttatcacaaagagaagccggagtatctgaagcaggcaatagagagcatacaagcgcagacgctctccacaaatgatttcgtgctggtatgtgatggacctctgaacgaaccattggatagcgtaatcgcagcgaagcaacaggagatgggtgaatctctgaatgttgtccgcctcgcgaagaacggtggacttggcaacgcactcaatgaaggcatcaagcattgcaaaaatgagctggttgcccggatggacagcgatgacatcgcttatccggatcgatgtgaaaaacagatcgctgtgtttaacacacattcggaggtgagtatttgctccggtatcgtggaggagtttactattgatccgcacaccgtcgatacaaggcgtgtgccgcccgagacaaatgcggaaatcgtagagtttgcaaagaagcgcaatccgtttaatcacccctgcgtgatgtataagaaatccgcagtcgaggcagttggctcctatcaggatttctatcttctggaggattattacctctggcttcgaatgctgatggcaggatatcagggttacaacattcaagagccgctgctccatatgagagctggctcggatatgtatttaagaagagccggttggaaatacgccaagacgcaggccaagttgttcaaatttatgaaacagcaaggctttattggagaaggacagtacataaagagctgcgtgattcgcagcgggtcggcgctggctcccaactggctgcggaagtttatgtttgagagggtattaagggatgcaggctaagacagaaaaccgaaatcaatttgtggatatcatgcgtggcatagcgatgcttctggttgttctgcaacatacaatgagtggatgtacggtcggagcagaaaacacatttgtgtttaatattgcatggtccttgcagatgccgttgtttatcttgattagcggatatgtaacgaaatatagccgcccaatctctgatggtaaggggctgtggaaatatgtgaagcgtagaacggttgcttatatgctgccgtgggctgtatggagttttttggttagaggcatcatctttggagaggatagtttcctaaacgttaagcatctcctgtggaatatggattcaggttattggttcctcgcaacgatttggacgattagcatgattttcggcgtggcgtctttcgttgcagagcgggcgagcaaagaaaatctgctgaagaaacagattgtacttctggggtgctacttggcaggaatggttctgctggttggaattggcgtgattttaggactttcgttctttgcaatcaaattgacgctctattatatgcctttctactatgcaggatttttgtatggtcagtttgatgataggatgaaggaatctgagactggcaaaaagatgattgatagcgtagttgctatctgttttgtaatgtggctgttcgttattcttagatttccgctttatgagatgtcggatggcggctttgcgattatcttacgtgcggcaacatcgttggctgggtgtattgcagtatgtggactctgcaaggggatcttctccgaaaaatcggggggggggtacccttgcgtgggtcggagagcactcactggaagtgtacctcactcactatctgctactcagcttaatcaagctggacgaagcaccaattctatacagtccgacagggctgagcatggttctggtcaactatgtgattacggtagcacttactgtgatggcaatagtgatgatgagtcaaaatgttgtgctgagatttgtattaaccggaaagaaaaagtaagggatgttttcctttgggcaggaaaacaaagcatggaaatttacatgatgcacggcctgcttctcaatatcttcaaaagcagtgctgtaatccaatttagcagtattgaagggtatttactggctgccggaaactttgccctgacaatagggctatgtgcagtggttatccgcctgctcaatcaaaatgttgtactcaagaaagtattaaatattcgataaatggtcaaaggagaaatgacatgcatccgagagtgctgatcgtaggaacagttccatataacacaaaatcaacgtcacgcgcttttgatgcgtactttcactattgggagaaagaaaatcttgcacagatattctccaatacaaagaagccgtgcaaggggcattgcgagacgctttttcaggttacggatcaccgtgtgttgcagcggtggatggggaagaaagtcgataccggcgtaatctaccactatgatgagcttgacacggagtggcttgacaatgatttggaactcggcgatgcaaaagcagaagccgcctacaagtttggtggaaagcatacgccccttacgcatttgctcagaggaatcctctggcgaaagaggttttggtgcacagagaagctaaataattggctcgacaacttcaaaccggaatgtgtgtttctggctttttcggatgactattttatcccgcagattgcaatgtatgtcgccaagaggtataacgtcccgattgtctcctgcattggcgatgactactatttcaatgtggagaaaacgctgaatcccatctatcacctttataaatcgacttataaaaaattgattgataaggttctggcatggccgggcagcgcaatttacatcagcgacaagattcgggataagtataattcggaatttggactggacggcgaaacggtttatttgacttctacggttcagcgtaaaccgttcagcgtaattaacaaagattgcccggttattacttacttcggaaatatcggtatgggacgcaacaactccctgaacgatattggctacgcccttggaaaaatcaatccagaatatatgctggaggtttattccaacgaaaaggacgagcaggtctattctgtattcaaggacaataaaaatgtcaaatatatgggttctgtgccgtacacgcaggttcaaaagcgcatggcagaaagcgacataactgttattgtagagggatttgaggaaaaggacatcaacctttcacggtattcactctctacgaaggcagcggacgcattggcgagtggtgcatccattctaacatatggctcgctagaaagcggcatcattgagtatatgcagtcaacggatgcggcaatggtttgtacggataaagctaaattggtggattcgattacacagctgatttctaatcaggaaattcaaaagaaatactacgaacaggcgattgtgatgacaagagagcatcataatctgcaggctagctgcaagacctcagaaaatgtggttgcaaaggcaatccaacatatgaaataagtggcagaggatacatggtgatggagaataacttttcaattattatttcgacgtgcgacaagttttcggatttgtgggatgcacatgttttgcttttgaatcagaattgggcagaccgaaacgtggagacgtttttagtaaccgataaacccactgatcgtacttttgaaaatgtaacagtggtggcagcaggcgaaggcacggaaataacggaacgtctgagagcagtgatgccgctgattaagacagagtatgttctctttaccttggatgactatttcctgacggaaaggatttcgactcaggcaattaacgaagatattcagatcatggaaaagcatcagattgattatctgcgcctgtttgttatgaccatgaagagcctgagaaacagaaaagctgaggaactcgaaccggatatttttctgctggacaattatgcaggtgactacattgtcagtctgtatgcaggcatctggcgtaaggattttatggaaaaaacgctgacgaaaacgctgaatgcctggcagtatgaggttgcgttgacgaatatggcacgacagctgaatgcccgttgcgcagatagccgacgcggggaattccctattcttgacgtgattcgtaagggaaaggtgctgacgaaggcacgcaagtatttcgatgagaatcctatttataaaggtgaccgagaggatatgcgagctaaagatgaatggatgcttgaattccggacatggctgcgtgagtggcttccgaagccgctgttcaatctctcaaaggcaatcatgaggcgtagaggatataagttctttagtgataatcagtgaggagtacgagtgatgcgtattgtgcagatcaatggtggagcgaaaggtagcaccggaaaaatcatgatggggattgccgatgtagcaagagcgcagggacacgaggtgatgtgcgcatcgcctatcaccacaacaaatcgtgatgcgggtgaggattgcggctattaccgaatcggaacattcaatagtcgccgagtaaatgtcgctcttgctcgaattacaggttttaatggttgcttcgcatggttcgagacgtataagcttttgaagaagatagatgaatttaagcccgatatcattcattttcataatttgcacgattcatatatcaatttaccgatgctcttttcatatataaaaaaacataatgtcccgacagtatggacattgcatgattgctggtcattcactgggcaatgcccgtactttactatagtaaggtgcgacaagtggaagactggttgtcataattgcccacagtataaggaatatcctgcctcgttttacgataatacgaaaagaatgtggaagctgaagaaaaaatggtttaccggcattgggaatatgacaattgtaacaccgtcaaagtggttggcggaactggcaaaggaatcgtatttgaaagagtatccaattgaagtaataaataacggaatcgatttggacgtttttaagccaactccgagcaattttagagaacgctatgggataccggcagaaacacacattgttttgggagtttcttttgcatgggggtatcgtaagggactggactgttttgttgaaatggcggaaaaattaggtgagcaatatcaaattgtccttgtcggtacagatgatgagattgacaagaatctgccgcaaaatattatttcaattcatcgaacacaaaatcaaaaagaacttgccgagatttatagcgcagcggatgtgtttgcaatgccgacaagagaggaaaactatccaacagtcaatatggaagctattgcgtgtggaactccggttgtgacatttaatacagggggaagtccggagatgttgaatgaaaaggttgaccgggttgttcctgtggatgatgtcaatgaaatgatgagtgaaataaagaatatctgtacaggggtgggcgataaaggaagaatgaacggacttgacaaactgtctatgaagattaagttccgcgaatatattactttatataatatgaggtgcaacaagtgaaagtcgtttttgttgtgtcgattttgtacatttttctttatgcgatgtacttgaatttgtcttttgcgtttggaaagataagagatccccgaagggataatatgtatctatgtatacttgttgttgcaatggctgtttttggaagcagtattaatcctccttcacatggatgggacttgtataggcattatcagtatttggaagcgttaagaacagccaattatagttttactgattatatgttcaatttcgacaatattttgggaggcggaacaagaagcggactatatgggtttaaattatacttttttttaatgagtcggttcaaaagcaataggttgcttccttttgttaccctccttattgtatatggtatatggtgctatattacgcaagattggctacagaaaaagaacagaacggaactattagcaccatcgtttttgttttgccttgcaacgatgccttacgtgtatgtcaatacaggaattcggaatggcttggcagcaagtatagtggcgttggctttatatcgggaatttgaaaagaatggatcgccaattgtgacagcgatgcttttagtattctcttgcacaattcacaatgctgttatcatagtaatcccgtgttggattcttgctcactttacagttaaaatgagaaccattttcatccttgctattggactggcactattggagcctgttgcacaacttatatatgctcagtcaattccgggtatttcccaagcagctaacttgtatttacgctacataaaatctgatgcatatttcttttcgtatggttatctaatagttgatattatctttatattactgataacttatgcgttctaccacgtcaataagagggataatagcagattattatataggtttgtgttaatttatgcacttgttattatgacacaaatcggacactatgatttggttctgcgtcccatgtatgttctagcgatgctttctgggattattgtcaataatttgtatagctatttcaggtcttacctcggaaaaaacgtaatatcagttgctatattttgtgcatggctaacagccgttgttatacacggtcctgcgtatttgttgatgagctatctgtgaggaaaacaaaatgaaacgacaagcgaacattgagttattaaggattgtagctatgctcatgattatcggcagccatctggcgcttcatggtgtacagagcgactggaatgtatggagtgctggtaataggattaatcgggtatttaccagttttttgaaacccgggggggggataggtgttgctgttttctttatgattacaggatactttaacgtgtgtaaagagaaggtgtctgccaagagaacgatacaagtgacaatcttttatggattcctatgcggaatgataggtgttttgcaaatagtaagaggaaacgtttcaaccgatagcatcaagagtattttgcgcagctttttgtcaccagtaatggggggatgctggtggtttgtgacggcatatattctacttacactgatttcccccacgttgaacaaatatttgtcaaacattggcagtaccaagttcttattagtggtcggagcattttggctttttgaatatactgtcggcaatatcacaacgaaccaatattttcaactgcagagagcggtaatgttttatttgattggggcatatctaagaaagcaaaacacttcactcggcagaaaaatatattatattatgggttttgcattgacatattgtctaaatggaattgtacagtatttcagcgatgcagcaatatctgctggaaaaactggaatcacaaatgaaataacagtttttgcatcaagctgcgtgattaattcggtgtttgtaattattgaagcaatttgcctgttccgtttatttttacaaattaatataaactcagaaaggattgtgaccattggacgaagtgtttttggaatctacttattacatgattccccttttacaagaaatgttatttggcatgatattgtaaaaatagaaaatctttatgcgatgaaaaattatccgattctggcgttactgacaacaatatgtgtatttctatcatgttatatgtttgaaaaaattcgaaacacgtatcttgagaaaccaatagaaaagggtgtccatagatgctatatgcgtataggaagttttttaaatttcgatagggaatattgaatgtaatggattcatcttcccctttggtaaaaagttaaaggaagaaaggacagcatagagtagggtatgaataaagttgccaagaatgcggtctggatcataggaatcagagtcgtacaagcagttgttgcgatgctgattaatatgctgacagcaaggtatctaggtccatcaggatttggactgattacatatgcgtcttctctggttgcatttgtgcttccaatcatgcaactggggttgagcaatgtgttggtacaggaaatagtcaataatccaaatgatgaaggaaagatactgggaacatccattactttgagcttcatctcatcaatttgctgcattgtaggagtcacagcgtttgcatttgttgcgaatccggatgagcctacgacaattttggtttgttttttgtacagccttattttgattttccaggcatttgattatgtggaatactggtatcaggccaaattgatgtcaaaatacacatcaatgattagcttggtggcgtatattgtcgtatcaatctataaaatttttctgcttgtaaatggaaaaagtgtgtactggtttgcaatctctaatgcattggactatgtcctaatatcttcgggagggttactgctttatcgaaaactaggtggaagtaaattgaaattttcaattgagacaggaaggatgatgtttgaaaagagcaagcattatattctgtcatccatgatggttacggtttttgctcaaacagataagataatgctaaagatgatgctgaacgaatccgcaactggatattacggggcggctgtcacatgtgcgggtatgacgggctttgtttttacagcgattatagattcttttcgaccgtcaatttttgaaggtctaaaagatggaaaggatgtctttcgccatcggttgacgatgctatattcgattgttatatatctttcattggcgcagagtgtcgtcatgacgctgttttcaagatggattattttcattctatacgggacggcatataatccagcaataagcgcacttcaaattatagtatggtatacaactttttcctacatgggatcggttcgtaatatatggattcttgcgaatgacaaacaaaagtatttatggcaaatcaatatgttcggtgcgattgctaatgtgattataaacgtgcttttaattccgcgaatggggatcaatggagcggcggtggcgtctctaattacgcaattcttcactaatgttgtagtgggctatattataaagcccataagagggaacaataaaataatcgaggaagcgttgaagccaaaatatcttctggatgcagcgaaaaaacttagaaagagttcttaaaatgaatttgaatgttaggaatgaaaataagctcagaggtcaatgaactgaattttattagtgatttgactcgacttcaagtctaacgattaaatatatagatccatcgaatctatatggatgtgtatcatgaaactgctgatgtgtttttgaacatgaaaaatgagttgaagagaattagtcgaagagaacagacgaaagctgttcttcaagtataaacactatttgttgaaataacaggaggaaaattaaaatgtctgcatttgataacgcaacccttatgatcactggtggcactggttcttttggttccaccgttttgaagcactttctggattccgatttgaaggagatccgcatcttctcccgtgacgagaagaagcaggatgacatgcgtcacgagcttcaggcaaagcacccggagactgctggcaaggtcaagttctatatcggtgatgtccgcaaccctcagtccatccgtgacgcaatgcccggtgttgactacatcttccacgcagccgcgctgaagcaggtcccttcctgcgagttcttccccatgcaggctgtccagaccaacatcatcggcactgataatgtgctgcacgctgccattgatgccggtgtcaagcgtgttgtctgcctgtccaccgacaaggcagcttaccccattaatgccatgggtatctccaaagccatgatggagcacgtcatctacgcaaacgcccgtgtggctgccgagcggggcggcacgaccatctgctgcacccgttacggcaacgtgatgtgcagccgtggctctgtcattccgctgttcattgaccagatcaaggctggcaaccccatcaccattaccgaccccaatatgacccgctttctgatgaacctggacgaggcggtggatctggtcttgttcgctttccaacatgcaaatcccggtgatttgttcatccagaagtctgatgcttccaccatcggcgatctggcaaaggccgtccagcagctgttcggcgataccggtacgaacatcatcggcactcgtcacggcgagaagctgttcgagaccctgatgacccgtgaggagcgtctgcgcagccaggatatgggtcattacttccgtgttgctgcggataatcgcgacctgaactatgataagttcgtggtcaagggcgaagtacataccatggcggacgagtcctacaccagccacaacactacccgtctggatgtggaaggcactgttaagaagatcctgaccaccgaatatgtccagaacgcactgaagggcatagagaaccagaaaagtgccagcgatttcgacgcgctggagccacgaaaaaggggctgctcgccccttttaaccccaaagaagagggctacaccggaaaaaactgaagattcacgcctgttcggcgtgaagatcttttaaccgttttttccggctccgccgatttaaagcccctcagtcgctgcgcgacagctcccccaagggggagcggcacgtccgcagcgccgcgctttcgcagaaagcggcgctgcaaatgccgtttgccgttacgacccctcccgtgaaaaggcaattctggaaaatccgcagattttccagaattgcaaaattataaatattctttccgctgaatatgcccagcaacgacgacgaccgccgccagcggcggaaacagggaggagttgttggggcagcggccagcaagacgcgcgtgccgcccaaggcacgatgcggatgctgggtgccgcaacccgtaaaacgcggagggcatttccaatcgtcccgccgtggggcgcaaagacttttctttttgcatagaaatgtgcttttgattatggtatactaacagcagactgaaaaagcgccccttgaaaggggcttatccgatacaaaaacgaggaacactatgaaaaaagtcatttcggtccgtttcaaggaaaacggcaaaagctattattttgatcccggtgatgctgtcatccacaccggggagtatgtgatcgtggagactgcccgcggcgtggagtgcggcgaggtggtgcagggcgtgctggagctggcggatgccgccgtacccaaggcgctgaaacccatcacccgtatggccgacagcgtggatatccgccggatgcgccagaaccgcgaggacgaaaagcgcgcctaccgcacctgtcaggagtgcatcgcccgccacgggctggagatgaagctggtggaggccgagtacacgctggaccgctccaagatcatgttctacttcaccgctgacgggcgggtggacttccgggaactggtcaaggatctggccggcatcttccacacccgcatcgagctgcgccagatcggcgtgcgcgacgagagcaagatgatcggcggtctgggcatctgcggtcagcctttctgctgcagccgctttttaaaggatttccagcctgtttccatcaagatggcaaaggagcagggcctttcgctgaaccccaccaagatcagcggtgcctgcggccgcctgatgtgctgccttgcctacgaggagagcgcctacgagtacctgaacagcatcatgcccatggtgggcagcacggtgcgcaccccggacggtctgggcactgtgctggaggtgaacccggtgtccggctacctgcgggtacgctgcggcaccgagagccttgccccccggtactacaaggtgggcgtgtgcgagtatgtgagcggcggcaagcgcccgccccgccgtcccgacccggacgatgattactccggcgtgcgcaaccccgccccggtggtggcaagctccgacgacgaaaagcgccccgcctgcccccgccgccgcgcaagtgaaaaggaataagcacccatagagagcgattttccggtaaggggctgttgcacatggtcagcggactcgccctctcaggcgctaacgcgccagctctcccaaagggagagcctttggcagcccccgcagacttcatctctttgccaaggcctctccctttgggagaggtggatttgcgaagcaaagacggagagggcgagcaagctaaagtaaaagtatctgcaaataaatgctgactttctggatttaggagcgaatataaaagggacaagcgttaagctttgagatgaacgtcagagtggttagtattataaaactaactaggcttcgtgattttcgctaaaaatctccggcaattttggctataagttaggccgtgcttttgtgcaaccccacaaaatattttattttgtggttgtggcaacacggttagtcttgccttttccggcctgctttgttagaatgcagacaaggatacaaattccggggggcgtgcgtggccgtgccaaggtacgtttcttcataattacatcggcacgggataaaaaaggagagtttattatggcacacaaggtttctgacgcatgtgttggctgcggcgcttgcgagggcgcttgcccggttggcgctatcaccatcgagaacggcgctgcagttgtgaacgctgattcctgcatcgattgcggtgcttgcgagggtgcttgccccactggtgcaatcgctgctgaataatcagtagtttttgctgaaaacgcatcaaaaaggactgctgcacacctgtgcagcagtccttttttgtggtatcataaagtaaattcatgaaaaacgcagttcggcgcgtccgcagacgcgccgaactgctgaatcaaaaacatttttccgctgcacatggccaaagcacacgcggcggccattcctgatcgtccaccgcaaaagaggcactgcacaaaatgctgcgcagccgccccctttttgtttcatgcacaaattccgcaggaaaataccctgcattttttggaagggaaacgacacactgtctatggaacattctacggaagttttgtataatagaactatggtctactgcaccccggagcaccggttcggctcggatgcgctgctgctggcacgcttctgcgagccgaagcgcagccagaaagccgcagacctgtgctccggctgcggcatcgtggcgctggaatggcacgaccgggggcatcgcggcccctgcaccgcgctggagctgcagcccgagggcagtgccctgctggcggcagcggtggaagagcagcagctcacccacatcacccccgcctgtgccgacctgcgcacatggcggcaggacgaggggcaatttgacgtgtgcgcgtgcaatcccccttattttaccgaggggccgcaaagtaaaaacgccgcccacgcccttgccaggcacgaaaacacctgcgctttggaggatgtctgtgcctgcggcttccggctattgaaggacggcgggcggctggcgctgtgccaccgcccggagcggctggccgaagtgcttgccgtgctgcgcgcccatcggctggaacccaagcggctggcctttgtaaagaacgccccggaaaacgctccgtggctgttccttgtggaagcccagaagaaccgcaggaccggcctgcgggtggagccggacgtgctcatccgcgccggagcggcgctgtacggacgataaattcaggaggtaattatggcaggaactctctacatcgtggcgacccccatcggcaatctggaggatatgccgccccgggtggctgccacctttggcgcggctgactttattgccgccgaggacacccgtgtgaccatgaagctgctgaattatctggggctgaaaaagcccatggtcagctactacgagcacgccttgcagaagggcgaagccattttgcagcgcatcgaggcaggggagagctgtgccttgtgcagcgacgccggcatgccctgcgtgtccgacccgggcgaggtcatcgtgcgggacgcactggcgcggggcatcaaggtggtgcccatcccggccgcttctgcctgcgtcacggcgctggcggtctccgggcaggacacctcccgctgggtgttcgagggctttctgccggtgaaccgcaagcagaaaaaagagcgtctggccgagcttttacaggaaaagcgcaccgtcatcttttacgaagcgccccacaagctgcgcaccacgctggatgacctgaccgccgcctttggcgcagagcgcagcattaccctgtgccgggagctgaccaagctccacgaggagatctggaaaaccaccttgggcgaagccgtggagcactaccgcgccgccgagccccggggcgagtatgtgctggtgatggcgggtgcgcccgccggtgccgccgacgaggaggagctgacactggagcaggcggcgcagcgcgcctttgcgctgaccattgagggtttcagcgcttctgccgccgccaaggctgctgcgcagggcacggcctattccaagagcgaagtgtacaagcagctgctgctgttgcagcagactgccgaatgagtgtataggaggatatttttccgtgacaaaactactggtcctgagcgacagccacggcgcgcgtgacgccattaagcgcattttgaacaaagagcagaacaacgtggatgctgtgatctttttgggggacggcctgcgggatctggagcaggcgctggcctttttccctcacctgcgggtgtattccgtggccggcaactgtgattacggtgcgctggagccgctggatggccttgcgggcttcgatcagacggtggttttctatacacacggccatatgtatggtgtaaaatacgatctggatacgctggcggacgccgccgccgcccggggcgccgaggttgcactgttcggccactcccatattccccacgcggagcagcggggcaatgtatttttgttcaaccccggctcctgcgggcgctgctacaccggcccggacacctacggtctgctgacgctggaaaacggcgcagtgaccgcctatgagcacaaagaggtacccaagcaatgagcatcaacgaggtgcgctatctgccggaatgcggcagcaccaacgcctatgtaaaagagcattttgaggagttcggccccgttgcggcggtatataccgaaaaccagaccgccggacgcgggcggcttggccgcagctgggtaaacgccgagggcaaggcgctgtactacacagtcgccatcaaggagccgctggcacagcctgccaccctgccgctgctggcaagccttgcggtgcgccgccagctgcagctgcgctacggcgtggactgccagatcaagtggcccaacgaccttttgctgaacggcaaaaaaatcgtgggcatcctgtgcgagagcgtaagctacggctaccagcagcaggggcgcggcatcctgtgcggcatcggcatcaaccttgcccagccccagagctattttgacgccgccgatctgccccacggcacctcgctggccttgcagggcgctgcggtggatctttctaccgatcccgcatggctggcggaggggctgaccgactttggctttgaccgcaacctgtacacctttgcacgggacggctttgcgcccttccgggaggaatacaaggccgcctgcatcaatctgggccgccgggtcacctttgacctgccggacggcagtcagggcgcaggcgaagccgtggatgtggacgccgaggggcgtttagtggtgcgcaccgatgccggggaacagcacgttttcaccggggaagtgtcggtgcacggcatctacggggcagtgtaattgataaaagcgcctgtccggcttcgccggacaggcgctttactcttccttatcttctctttttcatctggcggcggcgctggttaagggtcagcccgccgccgcagcgcagggtgacaaagcccagtgcgcacaaaatcagaatcagggcgcagagcagcagcagggtggctttgatatcggtgcggaagtccgacacatactcccggtgggtcacaaggtctacctgtcccacctcgtagccatccagatagacggtggcggtgcccagcttctgcccctccttgacggtggcagagacgctctcgggcaggtcgaaggaatagctcaccttatcatcgctgtggccgtagccgctgaccggcgcggcggcgtacagctccacagccggctcggtgcggcacttgttcaggtctacggtggtcagcacggtttgggtatccaccagcggccggtcggcaaagctggcaaaggcccagtcaaaaaggtcgtcacacgcggtaaacaggtgatccagcgtgtcgcagccaaggatcaccagcccgtagttgtggccgtcctgctgggcaaaagccacgatgcagcggcctgccagcgtggtaaagccgcccttgacccactggacatactcccggtagttggcgctctcgctgttcatcaggctgttggagctgctgatggtgtgctccgccttgcgcagattggtggctggcagcacatagctggcggtgcccgccacctgtgcaaaggtctggttctccgcgcaggcggcggcgatctttgccagatcctgcgcggtggacacattgccgtagtcaaacaggccgtgggcacaggtaaagttcgtgccggtgcagcccagctccgccgcccgggcgttcatctgctgcacaaaacccaccacgctgccccccacgtcccacgcaatgacgctggcggcgtcgttggcgctgacgatgagcatagcgttcagcaggtcgatgcggcgcacggtctcgccgatgcgcagccctatggtggtgccgttggcattctggatatccttgaactcctgcgtcaggtcggtgggcacggtcacttcaccgttcaggtccttgccgctttccaccagcagcagggcggtcatcagcttggtaaggcttgccacatatttttgctggtcagcgttctggttcaggattgtcttgccggtgtccgcgttgaacagatacactgcctcagtctctgttgcagtctggacgggcatggggtatactgcaaataccggcagcactgcgctgacggcaaccgccagcgtgagcaccagtgccgccaaccggcggcagaacgtgttgtgaagcatgaaggtacccccttgaatcccgctccggcaaaaccggcgcgcacatttttgttccttacttataagaataccataaaagaaccaaaagagaaaggtggtttttaacaatgttcttatccttttgtggaaaaacgccccgcgatgagggcgcagcttttgtagcccccagcgctaccgtgcagggagatgtggttttaaagcccggctccaccgtctggtacggcgcggtgctgcgcggggatgacggcacgttgaccatcggcaaaaacagcaacgtgcaggacaacgcggtgctgcactgcgacatcggcggctgcgtgacccttggcgaaaacgtcacggtagggcactgcgcactggtgcacggctgcaccgtaggggacggcagtctcatcgggatgcacgccaccttgctgaaccactgcatggtaggcaaaaactgcatcatcggggcaggggcgctggtgccggaaggcatggtcatcccggacaattccgtggcggtgggcgtgcccgcccgggtcatcaagcaggtgagtgccgcgcaggtggaagccaacctgcacaacgccgcgcactatgtggagcacggaaagctgcacgcagagcagctgaaaaacgggtgagggcttcctcaaacgtttcattttgtatttttttcgcactgcggtacaaagtttcaagaactttcttgaattttcacagaaatgtaatgacttttttcgtaaaatcgggtatactgtatcttgcagggacagtggggccgcaaccacttccccgcacatgattcctcctcacaccaaagcaataccccaaacaagaaatccctccggtgtaccgcaagcgccggaggggtttcttgttgtttcgttatttttaaagggtacgcagctttgccgcgaacactgaaagcaccaccttggggttcacctgtgcgcccagccgctgcaatgcggcgtctgccagacgcaccgcctgccgtgcctgtgtgccctgcaccggggcgcgggggctgctgcgcagacctgccgctgccacggcgcggaaatcggtcagcagggcagaagccgccgccttgtccttttcgtaggcggcaagcagcacagcggcggtgtagctatcgcgggcggcagcggcgcgggcaagctccagcgccttttccacctgtgcggcgcgggcttcgtcccgggcgaccgccagcaccgtgccaatatgaccatcgaacagctcactgtacagtgcggctgtttttttgtccaccccctgcgccgcgcagtagcgggtgcagtcggcgggggacaccggtgccaccgcaaagctgacgcagcggctgcggatggtgggcagcacgctggccagcgaatccgccgtgagcagaaacagcaccccctccgggggctcctccatgaccttgagcagggcgttggcagattcctcgttcatgcgctccacatggtacaaaagcaccgcgcgcccctcggcggagaggctggtgttgaaaatttcgctgcgcatggcggtgacctgacccaccagatactttccgccgctgcccatgccggacactgaaatggcttcccgcacgatgccggtctccaccgtgccgctgtcgcgcttaccggcttttgccacggcgcggcagcactcgccccgcaaaagggcttcggcggcggcaccgccggcggggtagaggtagtcggcggcgatgcagcgggcggcaaagccggtgccaagaccggcttcgcccaccagcaaaacgctatgggtcagccgccgggtggccagcatctgctgcacgctggttttcagttctgcgttgccttccatgcggtccagcatcatgatgggagtactccttttgtgaaacggtaaaacgatttaaaatgccctccgcgttgctctgggcatgattcaaggaaagattatttataatttcgcgtttgtcgcgctctgcggagcgctccaaacgcattttcacgggagggtttatctcctgttcttccgtttccactgctcccggcgcacccatgcgcggagggagcggtaggccatgggggcaaaaaagagccagacgttgagcatggacaacaggtagtccagcttgccgggcagggaagcgcccagaaagctgaacacccacagcaccgctgcgaaaacgccgaaatattttacccggatggggatgacgaagaagagcagcagctgcacctccgggtagagcatggcaaaagccagcagcagcgaaagagacaggcagtaggtgctggcggtcacaccggtgagcaggcagcccagcaccgtgcccagcacgccggacagcagatacaccgtgtagcggaaatcgccccactcccgttccagcgccgtgccgatgaaccatgtgaagtagatgcccagcaccacgctgaggatgctgccgccggaaaaggggatgaatataaagctgatcacccgccagacctgcccttgcagcagaaggaaccggttcagccccagccagcccgtgatggtacggtcaataaacagctcgatggccagcactaagatctgccccgccaccagaatattggtcagattcgggattccgtagcggccatacttgcgctccagcttattcagccagttgttcatgtgtttcgcctccgttgcgggttgccccgccagtttcatgttacccctattttaccatgacagtcccccgcattcaagaaaatccacgcggaaggcgttgaaactgcactttctttcccggcagacaggctgcacgcgcagttttttcacaccgcagccgccggggtgtggaaaaggcgggaaaagcacagcattcatgcgggttttaagtcccaaaacgacaaccgaaaattgtatggactatccgttctggaatgaacttttcactttttccaccgggttttccaccgtttttgtgaaaaagaagcgcagtttccaacgatgttttccaccttttccacatagttttccacatccagtggaggaaagtcctatacaagccgtaatggatgccgccgcattctggaaatttgtgggcaaaaatgtgggcattctgccttttataaaaaagaaagtcgaaggtttttcttttgtttttacagtttactccggcttacgggtttgcttttctccaatctggaatcttaccccgggcagttttccacaaaccgccggggagaaaagcccggtgtggaaaacggacacaaacggtgattttccacactgtttttatcccggctgaaccctctcagtcgcctgcggcgaccatcgggagcagactgagagggttggatgcaaaaataagccctctcgggcagacaaagtgcctgagagggcttataaaaccatattttatgccttagcagcagcgcacactagggtatgcagcggcgcaggggtcagattttcgcttcctctaagtggagatacaccgcaacgtaggtcttgtcatccataacacgggtaacaatatcatactcatcgatccggtacaactgctgttcatcaataaagtaaacaggtccgtactgcgtcagattttccagggtcagcttaactgcctcaacggtactttcgcccgaaacattcaatgctatcgggtctgagaggatcatccaataccagctctccccaaatccgcgcccgttcgcctcatgatccccgccgtctctggctttgaacttcccgtcctcgctgattttctccagagcaaccatcatatccgagtgtttgacgtcaactttttgtaccggtttgcccggccgcttgctgttgatttgctctacaaaccaatcttcgtataccttgccaatggcagactgaggttgttctgctgcgccgcaggcggtgaacaatgccaaggccagcactgcggccagtaaaagtgctacaaagcgtcttgtctttttcatgatacatctccggtaacaaaaatacaggttctatccaacgtactggaactcaaacgacctcttttattattttacatcatcacacccgtggtgtgtcaattgacagagcatataaaatatcgccgtccttttgcgcaaatgcgccaaagggttggatgcaaaaatgccgggcggtccgcagaccgtccggcattgctttattctttacatcatattgcggaacaccagctgtgcgatctggaaatagaggatcaggctgcaagcgtccacgatggtggtgatgaagggggtagccataatggcggggtcggcacccagctttttggcggcaagcggcagcataccgcccaccagctttgccagaatgacgctgaagaacagcgacacgctgaccacgatggcgtagcccatcacgttggcatactggccggggaagaggaaggtgtacatcaggtagatgcgcaggccattcacgatgcccagcactgcgcccacgatggcagacacccgcagctccttggccagcacccgcataaagtcggcaggttctacctcgcccagtgccagaccgcgcaccatcagggtgctgatctggttgccgcagttaccggcggtatccatcagcatgggcatgaaggagaccagcagcggcaggctgacaaaggcttcctcgtagtgggtggtgaccatgccggtaaaggtagcggacagcatcagaatcagcagccaagggatgcgctgctttgcgtgggtccacacgctggtgccgaagtaggtggtggcgtcgtcatccgggagaatggcggccatcttctgcatatcctcggtgctctcgtcggtcagaacgtcaatggcatcgtcgatggtgatgatgcctacgaacattccctcgttgtccagaacgggcatggcggtaaagtcgtagcgctgcatctcacgcgccacaaactcctgatcatcggtgaccttcacggtgaccagattgtcctccatgatctccgtgatgggggtcttggggtctgccaacagcagattgcgggcagagacaacgccctgcagccggttgctctccaccacatagcaggtgtagacggtctcggcattctcgccctgtttgcggatggcggcaaaagcctgttccaccgtcatatccatgcgcagacgcacatattccggggtcatcaggctgccggcagagctttccgggtagttcagcagcttgttcaggctctcgcgggtctcccgggaggatttttccagcacccgcttgaccacgcctgcgggcatatcttccagcaggtcggcggcatcgtccaggctcatctcctcgatggcgctcaccagctccacgtccgagaaggcgtttaccagatcgtcccgggcttcgtcggacatataggcaaaggcttcggtggcaacttcctttttcagcagacggaacaccaccagacggttgttctcgtccagctcttccagcagctcggcaaggtcggcgggctgctcttcctcggtcacctcgcgcagcttgacgtactgctttttgatcagcagcttcagcagacggctcttggtcagcatctcggggtttgccttgacctcttcgtcattggcttcctcccgctctgcctcccgcatatcctgcttcagatcctcggtggcttcctcgttcagatcctccgccagcttctgacgcacctcggcggggatatcggagggcagctcctgcaccggcaggttctgttccgtgttggtttccagcttcttttcttccatatccatgggctacctcctctgggcaatatacggcacggagggctttctccgcgccggaggatgcagcaggtcgggaaacaaaaaacgcgccgcccggtgccggaatgccgcaaatgcagccgtttccgcgcacgcaaagccgcgcctttcctattccgggggcttttcagtaagccgccgggggcaaaaaggcgaacgcagtactttttgttgtccgatctaccgcatcggtggatctacttcgactatgatcagggtccattgtcctgcgttcacctcccagttttcgtaaattccacagccgcagcacccgcgccgggcgctgcactggctatatccttttttattatagcgccgcaaaaaaatggggtcaaccctaaagcgaagttttgcaaagatttttgcagcgtcttacagaaacaaaacacccttctccgtgttgcggcgcacagagaagggtgttttgcttggatattgccttggtgtgaggaggaatcatgttacttgggaagtggttgcggccccgcttcccatggcaaaagtataacagctttcacaattcatttcgttaagaagctatgaagaaactgtaaaaaggaagcggaaaattctggaagaatttgtgataagcttttcggttgacgttcggttgcagagatgctaaaatgaaactgtaaaagcagccatgaaggagggacttttatgagcgattgtgcatttttgaacaacagcggtaattttaccgcgttcacctacaacggcagaaccatccggttccgcacaccttcttcgctggaacgttacacggatattctagaatgggacaagggctatcttgtagtcatggcaaaatacaagggtgctcccgcagaagaagagtatatcgatctggttcccatcctgaacaatttgtatattgatgccgatgcttttttaaagccgattcgaaaggtagagttgcaatatgcctgatattttaagcgttgctgaccacgcagacatgatcgtaaatggctatgccttttcaaaaagcaatgattctgtccgtgttttgaatttgaataaccccgcaagtgcctgtgtactgtctgccgatggaaaggtactggaaaccaccatggatgatattgaattagccattgttcaggactattacagccggaaccggaagcatctggaggaatcgtaatgccgaaatattatgatttcaaaatttgcggttactatctttattttaccgcgcactgcatcattgaatgtatgcacgtccatgccagtgaccgtaaattgactgagggcggttctgcaaaattctttgtaaaaagcaatggagacactgtgatacaaaatcgcggggtgctgaccgacagggaactgagcaagattcaaagtttcatcaaagacaactataaggaaatgtacctcaagtgggcatctatgagcgaaaacggtttctttggcgagaactgatgcaaaattaaaaacagcaagggctgctacacgttatccggtgcagcagcccttgctgtttttttacataaaaatacgccccggtcaccttgcggtgagcggggcgctaaaaactgatgcagttttttcactgaggcaagatccctgcacagcaggtcttatgccgcaggcggagcaaggtatctgcacgcagaccttatgctcctgacacacgcggggtgtgctctcaagggccctcgcgggcgctttggtatctcaagcccctgcgcaaaaggaggggaatgaaatcaggtttttcgaccgttctgtcaggtacagggcaaaacgttcagcctgttctggcacggcaaaggcaaattccacagttccgcaccgctgcattgcgcagtaaccgccgatgcggggctgccgctcttcacacgggaaagagcaggggccgctggttcatttggtgtctctgccgctgcttaaaaacagcttacttgtacagctcgaccagacgggtcaggtgctcgtagcggtcgtttgcaacctcctggttgcgagcgaacagctccttagcacgctcggggaaggcgcgggtcagacggctgtaacgggtctcgtttgccagcagagcctgatacttctcgttgtccacagccttggaggtcagggtgaaggggttcttgccctgtgccttgttggcggggttgaaggtgaacaggttccagtagccagcctcgactgccttcttcatctcgttctggcagttggtcatgccgcccttgacaccgtgcagctcgcagggagcgtagccgatgatcagagaggggccggggtaagcctcagcctcggcaatagccttgacagcctgattcatgttagcgcccagagcgatctgagcaacatagatgtagccgtaggtcattgcgatctcggacaggctcttcttgctgatctccttacctgcagcagcgaactggcagacctcgccgatgttggaggccttggaagcctgtccaccggtgttggagtacatctcagtatcgaagaccatcacgttgacatcctcgccggaagccagaacgtgatccagaccgccgaagccgatgtcgtatgcccagccgtcgccgccgaagatccagacggacttcttggcgatgtactgcttgctcttcaggatctctgcagacttctcgcagccggcagcagcagccttctccagctcagcgatcagggcctttgcgggctcgtcgttggccttggtgttgttcttggttgcgatgaacttctcgtaagcagccttcagctcagcagaagccttgtcggaaccagcaacctctgcgatctccttgatcaggttctcgcggatggtcttctggccgatgtacaggcccagaccatgctctgcgttatcctcgaacagggagttgcaccatgcaggaccatggccgctgtccttgttgacggtgtacggagagatggaagcggtgccgccccagatagaggagcagccggtagcgttggagatgtacatcttctcgccgaacagctgagtgatcaggcgagcataagaggtctcggcacagcctgcgcaggagccagagaactccagcaggggctggttgaactgagagcccataacggtgtcatcggccatcttggtagccttcttggagatgttggccacgcagtagtcaaagactgcctgctgatcggcctggctgtcctgaggaaccatggtgatagccttggtggggcagacggtgacgcactcgccgcagcccatgcagtccagcggagaaacagccataacaaacttgtactcgggggtcagcttgttatcgcggctcttggtctgggcaggagcagctgccagctcgtcagcggtcagcaggaagggacggatggttgcatgagagcacacgaatgcacactggttgcagccaacgcactttgcagcatcccactcggggacgttgacagcggtgccgcgcttctcgtatgcagaagcgccctgctcccactcgccgtttgcatttgccacgaaggaggagacaggcaggctgtcgccgtccatacgggcaatgggctccatgacgtcgcggatctgcttgaccagttccggacggccagccagagccttgggtgcgggatcagcctcggggttggaccaggatgcgggcacgtctaccttgtggatagcgtcaacgcctgcgtcaatggccttccagttcatctcaacgacgtcctggcccttcttgccgtagctcttctgagctgcctgcttcatgaagttgacggcatcctcgatgggcatgacgtcagccagcttgaagaatgcagactgcaggatggtgttggtgcgcttgcccatgccgatctcgatagccttatcgatagcattgatggtatacagctggatgttgttgtcagcgatatacttctttgcctcggcgttcaggtgctggcccagctcctcatcggaccactggcagttgatcatgaacacgccgccgggcttgacatcctggaccatcttcatgcccatgtggatgtaagcggggttgtggcaggccacgaagtcagcctggttgatgtagtaggggctgcggatgggcttgtcgccgaaacgcaggtggctgatggtcacgccgccggtcttcttggagtcatactggaagtatgcctgaacatacttgtcggtatggtcgccaatgatcttgacggagttcttgtttgcgccgacggtgccgtcgccgcccagaccccagaacttgcactccttggtgccagcagctgcggtgatgggagcgggcttgacctcgggcagggacaggaaggtgacgtcatcggtgatacccagagtgaaacgctccttcggctgatccttctccagctccttgtacagagcgaagatggaggacgggggagtgtccttgctgcccagaccgtagcggccgccggtcagaacgatatcgttcaggccagcctcacgcagggtagcggcaacatccagatacaggggctcgcccagagagccgggctccttggtgcggtccagcacagccaccttcttggcggtcttgggcaggaccttcagcagagcggaggacacccaaggacggtacaggcggaccttgatgataccgaccttctcgcccttggcgttcaggtagtcgatgacctcgtcagcaacgtcgcagatggaacccatagccacgatcacgcggtcagcatcggctgcgccgtagtagttgaacagatcgtagttggtgcccagctttgcgttgatcttagccatgtacttctcaacaacagccggcagagcgttgtaaacgctgttgcaggcctcgcggtgctggaagaacacgtcgccgttctcgtgggaaccgcgcatcttggggctttcggggttcagagccttcttgcggaactcctcaacagcctccatgttgcacatttccttcagatcagcgtagtcccacttctcgatcttctggtactcgtgagaggtacggaagccatcgaagaagttcaggaagggaaccttgccctcgatggcgcacagatgtgcgacaggggacagatccataacttcctgcacgctgctctcgaccagcattgcaaagccggtctggcggcaagccataacgtcgctgtgatcaccaaagatgttcagggactgggtagcaacggtacgtgcagaaacatcgaacacgcagggcagctgctcagcagcgatcttgtacatgttggggatcatcagcagcaggccctgagaagcggtgaaggtggtggtaacagcacctgcacccagagagccgtggacagcaccagcggcgccggcctcggactccatctcaacgaccttgacctgattgccgaagatgttcttctggccggctgcggaccactggtccacagagtcagccatcggagaagacggggtaatggggtagatggcagccacgtccgtgtaggcatacgctacatgggcggcagcggtattgccatccatagtttgctttgctctaggcatttttcttcctccattattcagaatttggtaccttttgcgcggggcaatatgcccgctgggaccggagaaccccataaaaggcactattgcttgtatactataatagcagattccggcaataaagtaaacgcaaaccgcccgacaaacgcaccaaaaattaagaaattttttagcggttttgtactttctttagtgcgttaaagcaagcagtgatgcagattttcggtttttgcccaccgtcgcttccagaaattgtgattttttcgcaagaggggtttcctctcctcttgtatttatcatatctttattgacaacaaaccgcactttgccgtaaactgagagcataaaaccggcgctgcgccggaaaaggggcgtaaggtaaatgaacgatacagtacactttgaaaaaactctctccagcgagaccctgttcgaggggcgggtcattaccctgaccaaggacaccgcgctgctggaaaacggcaagaccgctacccgcgaggtggtgcatcaccacggcggtgcctgcatcctgccttattttgcagacggcaccatctgcatggtgcggcagttccgctatgccatgcagcagcagctgtgggagctgcccgctggcaagctggaaaagggcgaggacccctttgcagccgccaagcgggaactggaggaagagtgcggcctgaccgccgacaactacatctcgctgggcgaattctaccccaccgtgggctacgataccgaggtcatctatacttgggtagccaccggtctgcacgagaccaagatgcaccttgatgcggacgagttcctgacccccgaccgggtgccgctggaaaaggcgtatcagatggtcatgagcggcgagatcaaggacggcaagaccattgcgggcatcctgaagctgaaggctctgctggacgagggcaagctgtgatcttatacgaggacgccgcccttgtggtgctggacaagcccgccgggctttccagtgaggagggcgtgcccgccgcgctgcgggcgcactggaaggcacccgacgcctttgtgggggtggtgcaccggttggacaccggtgtgtccgggttgatggtctatgcccgcaccccggcagctgccgccgcactgagccgtcaggtgacccaaagtcaggacgcttacgccgtgcaggatggccgcgccgagggcaaagccgccgcgccgcagttcgtcaagcagtaccgcgcaatcattgccggtgcgccggacgcgcagctgcctgccaccggggtgctgcgggattacctgttcaaggacagccgcaagggcagggtgttcccggtcagccgtccccgcaagggggtgcgggaggcggtgctggaataccgcatccttgccacggcaggggaaaacagcctttccgagatcaccctgcacaccgggcgtacccatcagatccgggtgcagtttgccagccgcaggcacccgctgtacggcgacggcaaatacggcagccgccagaagggcagcattgccctgcaaagctgcggcctgcgctttgtgcacccggacaccggcaagcccatggccttttctctgcccctgcccgccgccgcaccgtggaaggagtttttggaattaggtgagtgatatggaacagcaatacaagactgatgccgaaatttacgccgtgctggagcgggagatcatcgacctgaccatccgtcctggctcttcgctgagcgagaacccactgtgcgcccggttcggtgcgccgcgctccctgatccgggtggtgctgcaaaaattgcaggaaaacgggctggtgcgcatcgtgccctacaagggcaccaccgtcacccggctgaaccggcgcatcgtggacgagctgatctacgagcgcaccgccgtggaggggcgcattttgcgagattttgcccccaacgccaccccggcgcagcgggcgcagatccgtgcgcgggtggacgcctacgaggcgcttgcccgcgccgagaacccggacttcaacaagctgtacgggatggactgccgcctgcacgagacatggtttgccgccatggacaagatgtacctgtggagcaccttacagaacgcccacgccgattacagccggttccgtatgctggacaccatgaccaccggcgggctggacgaggtgatcgccgaccaccgcaacctgctgaacgccatcgagcggtgcgaccttgccgcctttgagccgctggtggagcgccatctgtacggcggcatccgccgccttggcagtaagctgaccaaggaatacgccgacttttttgagccggaaaacatgaaataagtcaaattgttccacggggaacaaagacgagttaaaaagcccggagtgtccgcagacgctccgggcttttgatattcagaacactccggtgatgaaaatttccagcccgatgccgatgaggatgacaccgcccagaatacttgccttgccggaaagctgtgtgccgaactttttgccgatgcgcagacccgccatgcagaggatgaaggtgaccaccgcaatgatgatggcagcggtaagtgccatcaaccagccgtattccgagatggtgaagcccaccgaaagggcatcgatgctggtggcaatgccttgcatgaacagcgccccggcgctgagctgcgccgcctcctcggcttcctcgccccggatgccgtccagcagcatcttgccgccgatgtagcccagcagtgccagcgcgatccacgggatcagggtctcaaaggacgcaaacagctccacgatggtatgcacgcacacccagccgatcataggcattgcggcctgaaaaagggcgaaagtgcccgcaattttgcccatggtgcccttgttcattttagggtcgtgcagaccgtttgccatggacaccgaaaacgcatccatcgcaagccccacgcccagcaaaacgctgttgagaaaaaacacaaaactccattccattctgtctgcctcctgtttgttgaccgtattccaagcaaaaacaaaacccggccccgggcgcgttgtacgtccgggaccgggtgattttttgagatccactccatgtgcacgggcgcagcaaacacgcaccaaaacacatgagtctcgcaaatgaaagcaagccagaccgaaacagtcattatgttgacttgctgcgctctgcaaagcgcctgctactcccccacgggtattgtgatttcgtttattctagcacagtttcaaggggaagtccagacaaacctgacggtgaaacgatttttaatgtgctccgctgcgctgtgcacatcaatagcggaagaattatttataatttcgggtttcaggaaagtctgcggagcttgtcggggcaaagcccctccatctgctaacgcagaccgctctgccgcttaaaagccccactggggctttcattgcctttgccagcttcttttcaatgtcactggtatcattttcaaaaggccatgtcatagcttgccacctccttattccacaatcctgccatcctcaatgcggacaatccgatctgcaaggcgggctatgtcgtcattgtgggtaatcattacaacggtttgccggaactccgcgctggtgcgcttgataagtcccagcacctcggcgctggtcttgctgtcaaggttaccggttggctcatcggccagcacaatagccggtttggtaatcagagcgcgggcaatcgccacacgctgctgctgtccgccagaaagattattcggcatatttttcagtttatcttccagccccagcaggtgaacgatctcgtccaaaaacttctgatccaccgtgtccccgtccagctccaccggcaggacgatgttctcatacacattcagaataggaacaaggttatagttctggaagataaagccgatgttgcggcggcgaaagatggtaagctgttcatcgttcttctttgccagttcttcgccccggacgatcacggttccgctggtgggagtgtccagcccgcccatcatgtgaagcagggtggacttgccgctgccggatgttcccacaacggccacaaactcgccgtcctccacggagaagttcacaccgtcaagggcgcgggtaatgttcggctctgtgccgtaatattttttcagatcaatcgcctgtaaaacgctcatactcaaaactcctttcaaggctttctgcctgttgataaggctattgtaaaacccaaatgtccgcgaaatgttacagcggccaaaaaatttcattgaaaatcgggggtgaaatgttacaatccagaaacaaccgcccgtcgtcgtaaatgtccttggccggtttgtggtgttccagcatggcgaacatggctttgatttttcgctgcaaggccccgatcacaaagggctttgtgatgtagtccaccgcgcccacctcatagccccgtatctggtcgctctcctgatcgttggcggtcaggaatattacgatggtgtccgggtgctggggctttatcagcttgcacagttcaaaaccgttcccgtccggcaggttgatgtccagcagcactaaatcaaattcccgctggcggatggcttcggctgcggttctggcatttagggcagaagtcacgccgtagccgtctgcggtcaggttatagtctaacatcttattcaaaaaactgtcgtcctcgacaattaaaatctgctccatattctcacttcctttgctttttgcagatagtataacaggcaaatgtccgagaattgttacaaggacaaatatatttatcattttacagcttttttatgtgtactgcaattttataaaagaaaggacagcagtatcatcaaattgctgtccttgcggtttattatagctggtagtgtataagcgttggttcatcatatttggtgtggtatctttaactatgggaaactccccgctcccattttgaaactgctttatccgtaacatttagcttttgtgcaagttccagttgtgtccaccccctttcctttcttaattccgagatgaacgtaccaaatttttgactatccatgtcgattgtcctttctcttgaactgtctcaatccatatcacgttttccgatttatttccacctacgatttgtagagtccttcatttacttctctactttctgtttactttaagaaaatgatcgtaacagcgtccatgttttcgctcgccacttttccaatggattatgacagttttagcgagagattatccatattgattatgtgtagtgtaccacgaaccaacaaaaatatcggatgtcactaatgctgtaaaggagcgtgatgccattgacccaacccaaaaccgaccttgcctatctccgcagcgaaaaagccaaagcagagcagaagctgcgcgcttgtcagcaccgggagaaaatccttgaacgccagatgtcggagctgaaccggagagagcgtgtgcatcgtctttgcacccgtgccggaatgctggaaagttttctggtctgtccgggagaactgaccgacgatcaggtgatggaactgttgaagatctcgttccgtcaacctgaagtcgtgctggcgcttgcaaagatggtgcatgacgttcacgaacgcagcaacgtccaaaaccctttagaataaagggcgcaattatacaccgttccggtgaaattgcggtcttgcagacagctcgatgaaatcgaagctggcgtttgtgcgccagcccgattccatcccaaggaaaactgcattttccttgcgctgctttgcagctatccttttgcggctcccgcctgagaccaaagcgcatagcactccgttccaaggcggcgagcaaaaccgaatacgatcccagaccgttcatcaagagcaatcttgctgggcggtctttttgtttggaggtgatacctattccgtgtccgcatttcaaaatcaccatcgtcaagcgcagccaaggtcagtccgctgttgccggggccgcttatcagagcggcgaacggctgttcagcgagtacgaccagaaaacaaaattctacaacaagaagaaggaacttgtccatgccgagatcatgctgccgtcccatgcgccacccggatatgcagaccgggcaacactttggaacgccgtggaagccgtggagaaccagtggaactcccagcttgcccggcgcatcgtgctggcgtttccggtggaggtgccgaaagaacagtatctctccatgataaaggaattctgtcaggagcagtttgtttccaagggtatgattgctgactttgccatccacgacaaaggagatggcaacccacacgctcacattctgctgacgctccgggcaatggacgaacatggcaattggctcccgaaagcccgaaaggtatacgaccttgacgaaaacggtgagcgcatccggctcccctctggcaactggaagtgccacaaggaaaacacggtggactggaacgaccagaagtatgccgaggtctggcggcacagttgggagaccatcacaaaccgctatctggaggctgctggcagaccggaacgtgttgacctgcgctcctttgagcggcagggcggcatccagcagataccgaccgttcatctcggccctgctgcacaccagatggaaaaacggggaatcgaaacatttctcggaaatctcaaccgggacattcgagccgccaacagcctgatgcagtccatccgcagtgcaattcgtggtctgcaacactggatcgcagacctgaacgaaaagaagcggcttcttctggacgctctggaaaaggcgaaagagcccacgctgtccgacctgctggtggactacttcaatctccgcaatgagcagcgcagtgattggtctggcaaggcaaaactgaaatgcactgttcgggactttgaggaagtcaaacgggcggtggactatctgaaagcccattctctgaacaccattgagaatctggataccgcaatttctaacctgaaccagaccgccgcccctctccgcaggcagttgaagcagaacgaaaaccgtatgcgggcaatcgcccagatcaaggatgctgccgccgcccatgccaagctgaagcccatccacgacacctttatcaagaagaacttcaagttgaccaaggacgcttatgccgcccagcacaaagaggagctggacacctttaataaagctgtccgcactctgatgaaactgaacggcagcacagcggtagatttttcggcattggatgccgaattttctgcgctgcaatccggcagcgcagagctgcgcacccaactggaaaccttgcagccggatatctctgcactgaaaaatatccgcaagtatatcgacatggtgctgaataagcagcagctttccgcgccgggcggcaagatgccggagaaggaatcggtgctgaaacagctggagcagcttcagcagaaaaagtccaactacaaaacgatttccaccaccccaaaccgcgaagaatcgctctaaacgatctttctgtcaccgatacgccgttgcaatcagtggcagaaatacataattcgtatgtttttgttagcttttgactattctcgttggctagtgagtagaggcgtatttttaaggcggaaattttctccaacaccccccattttaggccactttttctgttaatagtagaagtgtttctttgaaggccagtcatttgtgacctttttgttaattctcaaaaagatggttgtctttgggctgttttcgttgcctacctattgagaggattttttcaaaagcggagattcggtctcaagaattacaattcaattacaagtttctcaccaatgctacgaaacaggcgttctcgatgcctaccaagtgtagggcatctttttcaagaccattctcggactattatgacgttttgtttacaaaattgcttgcaatgctacgaaatggcctttttcatcggctaccaagtagaaggatgtttttcgtccgtcaaagtccagaaatcttccatatgttccttgacaagtgaatagttcaatcgtccggtacttcacaaaaggtacttctgtaactcgcagcccggtcataacgaagacggggtggctgaaatgccaatggtgcggtgcaagcccgccgccggacgattccccactcctagggaagtcgaggaccaatatgggagaccttaacttattaacgcagttgagcacttgtttcgtgcttttctgcgactggagaattggaacccaccaattctcgttacatactctttgttcctgatttctgcttcagctggaggtgatcaacatttcagaatatcttaccacgcaaactccgctgccgccgtttctcccatacccacgctttcttttggaacttgacctgagccagactgcaaaaatgacttatgcgctgctgctcgaccgtgccacgctctcgcagaaaaatctctggacagatgaacgaggtttcgtgtttgtcatttttacgatttgctctttggctgagcagctagggcgcagcacggtcagtgtttccagtgcgcttaaggaattggacgctgcgggattgattgagcgcagacgaacgcggttttcttcgcccaatcacatctttgtaaaaattccaaatgttgaatagttctgcgtttttcacgattcaagaaccgccaaaatcacgattctgcgatgcagattcttaatggcatctgcaaaagagatttttcctatgcagtatagcagcctttaagactgtatcaaagaaaactttcacctaaccaacgtaataaaacaaaaagagaaaaacgaatagaatccatccattcctttccgtatttgcaccacatgaatgaggaggtctgcccttgaacaaagaaaaatccgagaagaagcccaccacacgcaaacgtgcgccgagaagtccgaagtctgtgcgcctgatcgtggaacgccattatatcggcaatgtgccgatgaatacgctttttcagcggcttgcggaagaagaaattcgtaaaactgccgaatcgtatctcgccgctggttaattggacgttttactgcggaaaagggcttgcatcatcacgcagcatccgctacaatgtgattgatgaggtctcttttccattatggaggtacacatggaaaaggacaaaaaagtaactgctttatactgccggctgtcaaaagatgacggttcaaacagcgaaagcctgagcatccgcactcaaaaggcgatgcttatggagtatgccacacgcaacggtttcgggaattgccagtactatgtcgatgatggttacagcggtacgaactctgaccgccctgcctttcaggaacttctggatgatatccgggaaggaaaggtggcaacagtcattaccaaagaccagtcccgacttggacgcaaccacatcgaaaccggaacgtatatggaaatcttctttcctgagcacggtgtccgctatattgcaatcaacgatggttatgattccaacgagcaatcccagatggatattgctccgttcagaaacatcatcaatgaaatgtacgccaaagacacttcccgaaaaatcaagagtgcccttcggacacgcaagaaaagcggaaagtatatctccagcaacgcaccgtttggctaccagaaagaccctgccgaccacaatcaccttgtgattgacccgaacaccgcccctgttgttgagtacatctattcaatggcagaggaagggctggggcttcaccgcatcgccaagcggctccacgatgaaaaagttctgaagccgtgttactacaagaaagagatgtttggccgctttattgatggtgaaaagatgtatgattgggataatgcctatatcagtcaggttctgcacagcccggtctacgccggacacatcatctacgaagccaagcccaccgtgtccatgaaatccaaaaagcgacgttatattccgtttgaagaacgtgccatcgttccgaatacacatgaagcaatcatcccacaagaccgttgggagaacgtgcagcgcatcctttacagccgttctggctgctttatgtgtgataagaccgactacgacaatattttcaagggaattatccgctgtgcagactgcggcagaacgatgttagtcaaggttgagcacaggcgcaaacgcaacagtgttctggatcagaccttttattgttgcagcacttatcggaaatatggtgcgaaagcctgtgactctcacaatttggaagcccgtgttctgcatgaagctgtctttgcagacattcaggcacacgcaaaggctgctgtgagcaatcgggaagcccttgtgaagaagattgcaaatcagatgcacctccgggtgtcctctgaccgggcgcagcacaaacgggatttgaagcagtgtaaagcacgaatcgcagaaatcgaagacctgtatgcaaaactttatgaggacgtatcaaagggacttctcccggagaaacgttttcaaatgcttgcggatcgctacgacaaagaacaggctgaactgaccgaaaagattgagcagtacgagcgggaaggccgtgctgaacacgatcagctggacaagattcaggattttattgatgaagtcagcaagtacgctggcatcaccgaactgaactataagattctgcatcagctgattgacaagattctggtatccaaagcggaaaaggtcgatggcgaatacgtccagaaaatccagattttctaccgctttatcggcccattggatgccatcgagtaacaaagtcagaaaagtcacctccgagaactatcctacagacgcagggcgcgagggcgaagcaattttccgccgtgtgtatgctcttgccggaagcaaactccccatcaagcggttgtggatcagcggtatggaggatgctgccatccagcagggctttgaaaacctgaaagatggtgcggcctacgacaacctgtttgcagcgtccgagtgcagggcaaaagcagactggctgatcggcatgaacggaacccgcgcctttacgaaaaagtacggcagaaagcagaccattggccgggtgcagaccccgacgctggcgatgctggccgaacggcaggcccaaatccagaacttcgtaaaggaaccctattacaaagtggaactgtccggcgcgggggttgtggcggtatcggaacagatggcgcaggagcaggatgccgataccatgcaggccgcttgtgatggacagtgcgccgtggttggcggcatcgagcgcaagagggtagaaaaaaagcccccgaaactgtatgacctgacaactttgcagcgagaagcaaaccgctattacggtctgaccgccagccagaccttgcaggcattgcaggaactgtatgaagaaaagctggtgacataccccagaacagacagccagtttgtgaccgaggatatgcgcaagacagtggaatctctggtactggctctggatggccagactgtggatgtgagctgcgttatcaataacagcaaagtcacagaccaccacgcgatcctgccgacgatgcagggcgcaaagtgtaataaggaaaagttgtccgaaaccaaacagaagattctttcgcttatcatctggaaactggtgcaggctgtgcagccgccgttcatctatgaggatattttggtgacggtatgctgccagggctggaacttcacggcaaaatataaggatgttctgcagcctggttatactgcaaaacctgttccgcttgtggagccggagaagaacaagaatgcgtcatttccgaacgacttggaacaggggatggttattccgacagtacgggcagagaaaaagcagggctttacttcgccgccgaaagtctacaccgaagctatatgctgtgaaagggggataagaaatcgcccatagaaaggagagtttttcaatgaaagcaaagaaaacggacaacggcaagataaccgcactatacgagcgtctttcccgcgacgacgacctcacaggcgacagcaacagcataatcaatcaaaagaaactgcttgaagattatgcaagggaacatggctttacgaattgcgtccactttaccgatgacggctggtctggggcaaacttcgagcgtccgaactggaaacgcatgattgcgggaattgaaagcggcgaaatcggctatgtactggtaaaggatttaagtcgtgtcggcagagattatctgcaagtgggattttacacagaagtcatgttcaaggagcggggcgtccgttttattgccatagcaaacggagttgacagcgacaagcgcgaaagcagcgagtttgccccgtttttgaatattatgaacgaatggtatgtgcgtgatagcagccgaaaaataacaagcgttctccacgcaagaggaatgtccggcaagcatacaaacagccattgtatttatggctataagaaagaccctaatgacaaagaccactggattatcgacgaggaagccgccgaggtagtacgccggatttaccgcatggcgttggagagcaaaggcccgtatgaaattgcccgtatccttgctttggaaaaggttgaaagaccgtcctattatcttgcacagcgcggcgtggggaaacatcagtctaattttaaccccgctgaacggtacacatggcgtggcggcacagttgccgatattctatccaagccggagtatatggggcatacagtaaacttccgcacctataaagaaagctacaaagacaaacgttccagaatgacacccaaagaggatttagtcatttttgaaaatacgcaggaagcaattattgacaaggaaacatgggaacgcgtacaaactctacggaaaaccattcgccggacagacagcataggaaaggccaatccactaaccggcttgatgttttgcgcggattgcggtgcaaagatgtataaccacaggggcaaggccggaaacgcgcgtgactgggcgggcagacccaacgggaaaaagcgtccggatcgtgacgagtacaactgttcccgttatgatttgggcaaccagcattatgataaatactgcacgacgcaccttattcgtactgctgttgtaaacgagcttttgttggaagccatcaagggcgtttgtgactatgcgttgaacaatgaagctgagtttatggcacaggtctgctccgcttccgaggacaggcaggaaaaagctgcaagatccattcgccagcggaagcagcgcaacgagaagcgtaccgatgaactgacccgcctaatccgaaagctctatgaggacaatgtaagtggccgactttccgataccctttttgaacaaatgctcagagatttcgaggccgagctaagcgatttgacagaaatcgtttcccaagaccaacaggaacttgaacgcataagcagggaaaccatcaacgccgaaaagtttctttcccttgtcagaaaatatacagatttttccgagttgacccctgccatgataaatgagtttgtagaaaaaatcctcgtccaccaagcccagggcaaaggagcaagcagaatacaggaaattgaaattttctttaattttgttggtaaggtggacatccctcacaaggaagtggaactgaccgaggaagaaaaggccgcgttagcggaacaggaacgccgccgagcgaaaaaagcagagtacaatcgacgctatatggaaaagaaacgcaggcaatggaaagagcagcaggagcaggagcaagccgagcaactgccccttgccgccgaacagaaaggagaacacatagcatgagctaatctatgtttgacggtcaagagccggaaaaaacagaaatcctgcgataacagccgccccgacgatacactccctgtccgggcggtttctatttgaaaatcctcattttccccaagtcaagagccgggaaaaacacccgaaaaatgcccctattgcgtaacaggggcgcagaaaggagagtttatgagaacagggcttacgaagcaggaaaagaccaccgatatatggtttgacgagaaagacccccttatccatatccgcacacacaacaccgacttaaagaagcggcttgccgcctactccggacagtaccccgaccagtgccgccagaccgacgcagaccccgaaacgggttgcatggagtttgagattgtaaaggggcgtttctctttccgtctgaccgccccatacagcgaagaacggaggaacgccgccagcaaagcggcaaagaaacattccggcaacttgacacaccctattcaaaaagatgtgctataatttttttgaaaaagtttcggattagatgtagtatttgccgctgaaaccgtagtacataggtgaagcccgaaaggaggcggtgagatgatagacgacgaaaaaatcatagaaatgttttttggacgttcagaacaaggcatacgagagctggatataaaatacggaaaggtctgccacaatctttcctaccatatcgtaggcagcagacaagacgcggaggaatgtgtaaacgacgcttatttaggcgcatggaacgccattcccccggcacgacctaacccgctgctatcttatcttgttaaaatcgttcggaacatttcactcaaaatctattggagaaaggaagcagccaaacgaagcagccattacacgattgctttggaagaaattgaagcctgtatagcagccccgaatacagtagaagcagaaatcgaagccaaagagttagcccgtatcattgaagcatttttagacacgctgactaccgaaaaccgcgttattttcatgcgccgctattggttttccgacagctataaggacatagccgagtttatggggctttcagaaaaaaacatttctgtccggctgacccgtatccgcgagaagatgaagcaatatttgattgaaagagaggtattcgtatgaatgcaaagaagttttccgacgctatgagcgagcttgacacaaaatatgtcgatgaagctctcaactacaagaagaaagccaaaaagcccatttgggtaaagtggggggctattgcagcttgctttgcagtaattgctgttttaggcgtaggcgtatttcaaaatggattgttcgggaacaaaactgacattgccactttggacaacggaaatgaaatcatctttgtaaaatcggaaactgctggctcaagcattgacattgacgggactataacaacaaggcaacttacggaaacggaagctgcatctctttttccaaacttgaccgttacagctcatgcagtttttcgtgttgatgatactgtttccgacagcaacaaagaattgattggttttgagggaaaaatcgaaaatgccaaagtggtaatatctacaacggatatagcactacttgatacgaagattgtaggaagtgaagaaagtagcgaagtaaatggcacaagcgtgacggcaggatattttgtaacagaccggaacagcgtgggagaacagaatgtaatttactatgcgacttttaagttgggagatagcaccgtatatgttgaaaatgcgggtgcaaaaactgaaagcgaaagtgtgaaaaacgatttggctaccattatccaagagctgataaataatggtgcgcttgacctaagttctttcaacggataaccccatgaaaatttaatactaccatcaggacagccgagaaaatcgactgtcctttttctatgcttatgagcagaaaggagcgcccaaccatgacaaagccaagagagaaaacccgcgaggagttgcaagccgagattgaggacggaaagaagaaaatccggcagtttgagaaccgagaaaagatgttgcgtcagaagctatccaaagaggaacgcagaacgcgcagccaccgccttatcgtccggggcgcagtctttgaaagcattgtgccggaagcaaagaacatgacnnnnnnnnnnctaaccagtgagccagcgcgggagtttttgaaaaaacgagccgaaagcgggaacgccgaataaatccctttggaacagtcctgctaataaaaatcaagcagtaaattgaaattctttctcagaagaaaatgagcgcagtaaaacagaggctcggcggtacgggcctctgaaattttggaaaacggaaatcaggcagctttgactgaagcagaaaaatatgctgtccggtgttcttccggggtaatcagaacgaatggacgttcatcccgcagaacggcaaagatgatattgcagactttgtgcataacagcacccagagccgtcatcttggacttgcttttacacttttcttcatagaaggatctcagtaccggattcttcgcagtgccgtccacacggaggctgacagattgtatcgccagaacatagatgcaacgtcgggcgtatggggagcctcgcttggacatcttcaggtcggcaccgctgaaatttccggattgcctgacggctggatcaagaccaaagtatgcgaaaagctgcttgggccgtttgaatgcagagaagtctcctatttcgcagaccagcgtgacagcagaaagaaagccaattcccggtatgctttggagcaagcgaacctgttttgccatctgagagtttttctgttccttcagaaggacttttacctgcgtcagaatctgcttcgtctgggcgtccaaaagacggatcatttctatgtagtgccggatcaaataaaaaacgccggtattcccatggccgaaattctgagcgtcccgagctgcttctaccagtgcctctgctttctttcggatgtggagagggcctttggagatgactgttttcatgaaccgctccagttcatctgccccagccgccaggatggagtccggagtcagatactcgtacagaactgccatggctgcaacaccgttgaccttggaaaacacaggaataaattgcggaaaaacctgccgaagctggtcttttaaccggcagatgtacatggaagtttcctttttcattgcataatattcccgaagaatcgctttcatggctgccacatcatcgctaggcacaatggatgttttcaaatccggacgcagacccagcagtgcaatcttctgtgcatcaaatttgtcgttgtggatattacggacgttaatatccttgctggcgtgagtaaccagtggattcaggacgtaggcatccagcccagcctctctcatcttgtggtatacaggaaaatggtaaatgcctgtagattccatgaagatacgggcaggcagatcgtattgttccataacagaatagatgcggtcaatggcaccatccagagagcgcttgctgttatggaaaatccggtaagactttcctagcagttcctgagagggcagcgcaatcgccatcaggctgaagtctgcaccaacatcaattccgacggagagatatttgcgattatcatttttcacagtaacccttctttcctatggttattacaggatgtccttctcaatcggtacgacacagcctagcgcgtaatataggtatagcaaaaaagctcccaaccagccaaatcatgaaacgcagccgaaaggataaacagactatacatcaggtatggggcagcaggaattgccgccctcccaagggcgcacccgttcatgctcctgtttggttacgattataaagctatttcatgaaatggatgttgcgttgggagcctgattgataggaataggaactgattttgcaaatctttcaggagagcgttcctattcccttagttattatactaagggcgcacttatacacccttgcgggcgtgtgcgctctgccgagggcttatctccgcacagggattttaccccgcgctccgatatggcggctttgccgcaacaaggggctgcaccccttgcgccgcttcgcggctatccctgcacacccacaaaaacagtacacccgccgttggcgtctgtaccatttttgcgggttttattatcctatccgggaggtgatacccatagccatttaccattggaacatcggcattgtgagccgaggaaaaggcaaatcagccgttgccgcagccgcctaccgaagcggcgaaaagctcacaaacgagtgggacggaatgacccatgactacacccgcaaaggcggcgttgtccatacagaaatcatgctgccgccccatgccccgccctcattctctgaccgttcagccttgtggaacagcgtggagctttacgagaaagccgggaacgcccagcttgccagagagattgacgcggcactccccatagaattatcacgagaggaacagatacggcttgtccgggaatactgttcctctcaatttgtttccagaggaatgtgtgtggattttgttatccacgacaccgacaagggcaacccccattgtcatatcatgctgactatgcgcccccttgacgagcgcggcacatgggcggcgaaatccaaaaaggaatatgatcttgatgaaaacggtgagcgcatccgcttgccaagtggcagatataagacgcgcaaaattgaccttacaggctggaacgacaaggacaacaccctcttgtggcgcagggcatgggctgactataccaacgactttttggagaggaacggaagcccggagcgcatcgaccaccgcagcaacgccgagcgcggcattgacgagatacccaccgtccacatgggcgtggcggcttgccagatggagaagaaaggtatcgccaccgagaaaggcgaactgaaccgcagtattcaaaaggcaaaccgccttatccgggaaatccgggcgcatattgggaagctcaaagaatggattgccgacctgttcaaagcgcgggaaaccgccccggaacagccgccgcaatctcccaaccttgcaaatctgttgatgaagtatttgagcgttcagagagaaaagagccggaagtattcgcagagttggcaacaacagcacacagccgatgaactgaaaaccatagcggcagcggtcaactatctttccgagcatggtatctctaatcttgacgagctggacgcttctctttcctctgtcagtgataaagcctattcaatccgggagggaatgaaaaccgccgaggaacgcatgaagaagctgcaaaagctaattgaatacgggaagaactatacagagtacaagcccattcacgatgagctgaaaaagctgcaaaacggctggacaaacaagcgcgacaagtacgaggaagcccaccgcgccgagctgacactatggaacgcagcaagccgctatctccatgcaaatctgccgaaaggaacaaagaccttgcctattgcggaatgggaacaggaatactctgacattaagacacagagagataccgactacaccaaactgaaagctgcccgcgccgaggttgccgagcttcaaaaaatccgcaggtgcgtggatattgcactccgcgccgaccagccggagcaggcacagacccgcaccaagcggcacgaacaggagcgataaaggaaaggacgggcaagctgttttacttgtccgtcctaaatgttttccgataaaatggacgctattgattcctaatattaaaaccaacttgctctttcgtccctaaattcgggcaggtcactatgctcataaggattataattattcaaattgcagccaaactctttcaatgattttattttattatcctttgtccattcaaccagcgaaattccatcaaattcctctatgctcccattgttcatttcatttttgaaataccactccacaatcgtctgatttcctttgtggaaaaattgtttgatttcccaagcaacgactttgccacgagtattccattcctgaaaccagtgttttacgatttgacggttattatattttggactccaactttcagtataaattacatcttctgcaaaaatattatcaatacctaaatcctgttttgtaagccacatttcaaaccataagtgaataattctttctctttcattcacaatccagcacctcactaacttccgatttttcggtttcattctacatcaaaactatgaacaattcaaccacagaaagagaggtatcagccatgtattacacccaataacagatagaccacgccaaccaagccgaccttgtttctttcctgcaatcacagggcgagcagcttacccgcgccggacaggaataccgctggaagcggcacgacagcttgaccgtccggggaaataaatggtatcgccacagccagagcaaaggcggcgcacctgttgattttgtcatggagtttttcggcaagagctttaccgaagccgttgaactgctgacaggagaaaaaggcgcagcaccgccgccggacagaccaagccccgcgcccatttctgacttccggctgccgccccgcagccccgacaaccgaacagcgaggaactacctcacagccgcccggcacattgatgaagatgtgacgggctttttcttttccaccggggatatttacgaggaagccgcccaccataacgccgtatttgtggggcgggacgaggacggaataccgcgctacgcccacagcaagggaacggcgggaaacttccggcttgatgtgaaaggcagcgacaaagcctttaacttctgctaccggggcgagggcgaaaggttgtttgtctttgaagccccgatagacctcttatctttcctctgcctgttcaaaaaggattggcaaaagcaaagctatctggcgttgggcggcgtgggcgaaaaagcccttttgcgtttcctttctgaccgtccgaacatcaagaccgtgtacctctgccttgacagcgaccaagccggaaacgacgcttgcagccgccttgcagagcttgtgccggagggcttgaccgtccatcggcttatccctcttttcaaggactggaacgaggtattgcagcaccgggcagaaatcacagacgggaagtatttgcgggaagcaatctacggcttgaaagagccgccgcaggaagaaaccgttgagattatccgcatgagcgaggttgacacacagaccgttgaatggctatggaagccgtatattccctttgggaaagtaaccattgtgcagggcaatcccggcgagggcaagaccacttttgccctacgccttgccgccgcctgcaccaccgggggaacgctgccgggaatgaagcccttgccgccattccaagtaatttaccagaccgccgaggacgggctgggcgataccgtcaagccacgcttgatagaagccgccgcagaccttgaccgggtgcttgtgattgatgaagccaagcgggagcttactctgtccgatgagcgcatagaaaaggcaatcacgcagaacggggcgcgtctgattatccttgaccccatacaggcgtacatgggcgaaaagaccgacatgaaccgggcaaacgaagtgcgccccatgttccgccgccttgccgatgttgccgagcgtaccgggtgcgccgttatccttatcggacatctcaacaaagctgccggagggcagagcgcataccggggcttaggttctatcgacttccgcgccgcagcaaggagcgtcctgctgatcgggcgcgtgaagcgagaaccgaatgtgcgcgttatcgtccatgacaaatcttcccttgcgccggagggcaagcccgttgccttttgccttgacccggaaacgggcttttcgtggataggcgaatatgatataaccgccgacgagctgctgtccggcgcgggcggcaacaacgccaccaaaaccgaacaggcggaacggctgatactggatttactggcagacgggaaagagcttgccagcgaggacatagagaaagccgccacagaagcgggcatatccgcccgtaccgtccgggcggcaaagagaaaccttgacgggcgcattacctcaaagcgcattggcgcggcatggtatcacgctcttaaaaagtgaaacggcaaaatccaagtggcaaaacccagataccttgccactttgccacttcgccacttcaacctcaaaaccaccgccccatgtatgaccgcatggggcttttctcatggaaaggagagcctatgaacaacgacaccagcaaccgcagcacccccgcaaccgcttcccctctgaccgtaaaggaagccgcgccacctgtaatgataaagaaaatcggaaagaccacctaccgcgtcaaaattcatttcagtgaaacgagcaaagaaaccatgagcgacaaaatcaagcgtctgattttgaatgacagcgaaaaaagttcttaaacacccttgacaaaacgtatcagaagataccctgctgtcggccatggaaacggcaggcaacaaggaatttgaaaaggacactgagaagaaaggtctgggaacccctgcaacgcgcgccgcaattctggaaaagctggtatcctctggctatgttgagcgtaaaggcaagcagatgattccaacggaggacggtgtggccgcaatccgcaatatcccggactacctgaaatctgccagtatgacagccgaatgggaaaatgacctgctgcggatggagcgcggtgagatcaagccccacgattttatgcagggcatccatggactgctcgacaagatgctggctgacctccggcagattcctaccgtcgtgacagttccccatcataataaggtaagcgtaggaagctgcccggtctgcggaaaccctgtacatgaaagtaaactcagcttttgctgtgcagaccgcagctgcaaatttgccctctggaaagaaagcagatacttgtccaacatgagaaaaacgctggacaagaagatggcggtagaccttttgaagaaaggccgcacccatgtaaaagacttttattccgcgaaaaaagataaaacatttgccgctgaccttgtgatgcgtgtcgaagagggccgcgcacagtacagcctggaatttcctaaaacaccgatgcaaacgaaaacgtaaaggaggtttgacccttgccacagattaacgatattcgagaattggcgcagcagaacgcccggtatgtcagtaactcgccacaggactggatgagctatctggatgtggcggcgcggctgtaccgctattcgttcaccgatacgctcctgatccacgcgcagcggcccgatgcaaccgcctgcgcagaaatggaactctggaatcagaaaatgagccgatgggtcaaccgtggcgcaaaaggcatcgcgcttctggatgataccggacctcgtaccaagctgcggtatgtgttcgatattgctgacactcatctggtgcgcggcggcagaacaccgctcttatggaatctggacagccacgagcatgagcaggctatcttagaccatctggcagatacctatggtttatcccagacagacagcatgaatgctgccctgatggagctggcacagcagctgaccgccgacaatctggatgaagcgatggatggtctgacctatgaggtgaaagacacttttctggaggaattggacgaagataacatccgcgtccgcttccgggaattgatgaccaacagtatcttctatacgctttcccggcgttgcgggcaggagcctatggatgtgctggacgatgatgactttatccgcatcgtggatttcaacaagctgccggtgctgtcgttccttggcaatgcggtttccgaacagtgcgaagcggttctttttgacattggccgtgagatgcggaaaatttacaaaaaagaaatcacgcagcagcttgaaaaatccgttgacagcttgtataatacaaatgcgaactttagcacattaaagcgtgaaaccgcagataccacgaccaaaggaggacaagaaaatggagttgacatattaccgcaagggagattatctgttcccgaatctggccgtgaaggacgagccgcagattatcgggaagtacgggatgctgcgcaggacgtacctgaaagagaaccgcaagaactggtatcagagtatgctgatgagcggcaagctgaaccagcatctggcgcagatcgaggaagcagcggagaaccgggtggaaaccctgctggacagcctgaacgagaagttcccggcaccgagcaaggagcaggacccgcttgcatgggcggcgcaccagaacaacctgacggcgatggccgaggagatcgtcttgaaggaattggtgtacaattaaccaaaacgacaacagaacaggatttgagcgaagcagaggaagaaattgcctctgctttttcttttcctgatctgccgaccgtggaacagcagatccgcgccattgaagcaccgatccgggcgcggtatgcggacgagattgcacttgattccaaagtagtcgatgaaatcctgcgcacgggcagcaaccgcagcaagggccagctgcgtctgatctacaatttcatggttgagaaaaccccggaagaatacacagagttcgtgaaaaacgaatatggtacgggcggcaaaggctttgaaattggcggtgcaaagtatgctgtctggttcgatgatttgggactgcgcattgcagtaggtggcacggcaaagggcggtacgattgccaatgcgtctttatcctgggaggatgtgagcaatcgtatccatgaactgctccggcagggcgagtatgcgccgcaggcggttctggatgctgcaaggcagaatgctttgcaggaacacgcgcagacattggcttatatggagcgcgacttggcagatggcgtttccgaagcagtgtttcaggatacagaaatcttcagaggcggtttcccggaattgacggacaggctggcgggcttgctggacgatacggattttctgactgacctcaacgaaagattgtctgcgctgggggaagcctatgccgaagataaagacctgatgcggatgcacttttataagccggataaagtggcagctctgttccagcagtttgcaaagccttatcagaactactcggcgcgggatggctttcactggaacgagaataagaagttcatcacggaagatgaaatcactgcttacttcacacggggcagcaattattcagacagtctactggcaatctattcgttcttcttaaatcatgaagataagaaagagcgggctgacttcctgaaagaccattacggaatcggcggcagcagtcatgcactctgtggggcagacgattctcacgaagatcacgatggcagaggcatttctttggaacgtagttcatatgggaacccagatgccagtgttcatctgaactggaaccaggctgcaggccgaattgaccggctgatccgtgacagtgagtatttgaagccagcagactactcccggatgcctgcttatgagtgcgagcggatggcaatgcaggtgatgggattctatcaccatctgccgaacgaggtggaacgtcctttcccgcaggatctttaccacgaagagggacgaaaggctctggttgaaaagctggcagaccccgaacaggcggtggaactgctggagcagatggacaatgcactgctgtctgtgccgctggattccgaagaatatgagcgaaaggcagaatccctctctatcctgcaccagtatgtcgagggaacgtacacgattttcccggaaaagaagagggctgttgagattgcggttcctgaacagggacagatgtccatgtttgacttcatggagcaggagccgcaatcgaaagagcagtcaaccgccgcagcggttgagaactctcaaaaggcaaaagtcgttgcgcggtatcagtcaacggtgatgatgcaggcgggatatattgaggatattgcaattctacaatattccgatggcaagttctataaccattataactatgacgaagaaaagggcacaggtgctgcagaaacagggccgtttaacagtctgaatgatgcaaaggcggtcattcgtcaaacgagagaagatgcaaaagcagtagaatcgtttgaaaatcagcccaagcaaatgtacagcagagaaaacggcagttttctgtatttggacaataaccatctgtaccgcattgagcgttccaatgctcatgacgtttatctgaaagatatggaaaattcggcggtggctggccgggtcattccgttaccgtcatatagcgaaacgctggcgaagaatccgctgaacgatttcctgaaactggatgcggaccacacccagaaagacagccgcagcatctataaagaatgtctgtacacgctgttggaaaaggtagagcgcagcgaaatctatccgttgctgcgtgaccgcgataccaccgaggaagaagcggaaaaactgatccgtgagaaaatcgaggatttgtttgattctggcgaggtggaaaatgctgtttactccgaggctatcgacacatgggcgcacttcggagagtggattcaagaagatattttccagcgcacctatcaggacgttattacggacagacgggatgccgttgcactgtatcaggatagcaaggacgcaccgcagtgggtgcgcggcatgatggttccgtatgcagcggaagaaaaggccgttgagccgaccttgcagcccctgccgctggatgccgccaacgagtataacgctctgaaagagcgttacccggatgcactggtcggctacgagcagcacggtaactttgagttctacggcgaggatgcaaagcgcgtttcagaacttcttggcagcaagctgttggaaaaggaaaccgcactcggcaaggttgaggtatctggttttccgcgtgaacagtgggtttcacaggcaatgaagctctggaagcagggggagagtgtctatctgtccggccagcaggaagatggaacccatgcccaaacgaaatacttccgcagagaggaatatctgcctgttaataccaccatcgaactggacgatagagagttccgtgtggattcggtggactttggaaatggaacggtcagtttgcaggacatgacccttgcaaaagaagcccggtatccgattttccgaacggaacagctggagtacattcggcatctgtacgaacaggcagatgtaccgatggaagaagcggttgaaatcacagtctttacggctctgcacaatgcgggtgtggcctacgaggatttctccccggagcagatggatgtgatctattcggtggcagaagcaggcggcgagttggaagaactgctgaatcctgacttcccgccagaacagatgcagctgatcgcagatgtgcagaaccgaacggatgccatcagccgtgcagcagcagaggaagcccttgaaccgctgacccagcagcctatgaccccggcagaggtcaaccatgcacggcggcagcacaatcttccgctggacagtggagcagaaacagaacagcctgcacagcccaaacagaaacctattaacttccgcataacggatgatgatctcggcgcaggagggccgaaagcaaagtataaagccaatgtggaagccattcgggtgctgcagacactggatgcagagcagcggcaggctaccgcagaagagcaggagatactttcccggtatgtgggctggggcggcattccgcaggcgttcgatgaaaacaacgcagaatggtcgaaagagtatgccgaactacagtccctgctcacggcagatgagtataaggaagcccgtgccagtaccctgaatgcgttttacacttctcctacggtcatcaaggcaatgtatgaagccctgggcaatatgggattgtccaaaggcaacgtacttgaaccgtcctgtggtgtcggcaatttcatgggtctggtgccggacagcatggagaagattcggatgtatggtgtggagctggacagcatttcgggccgcattgcacagcagttgtaccagaaaaacaagattgcggtgcagggctttgaaacaatgcagttcccggacagtttctttgactgtgttgtgggcaacgtacccttcggcaattacaaagtaccggataagcggtatgaccgccacaattttctcatccacgattattttattgcgaaaagtcttgaccttgtgcgtccgggcggcgtggtagcagtggtaacgtccagcggtacgatggataagaaggattcctctgtccgtgagtaccttgccaaccgtgccgatctggtcggcgcaattcgtctgccgaacaatgcgtttcagcgcaatgccaacacgagcgtggttgctgacattctgtttttgcagaagcgtgaccgtgcagcggtagagcgggcagactgggtagaccttagcgaaacaccgaaaggctactccatcaaccagtattttgcgcagcatcctgaaatggtgctgggggagatcaccacggaaagcacccagtacggcaagcaggaaaccacggtcaagcccatcgagggcgcagaccttgccaagcagttaaaagaggcggtcggcaacatccatgccaccatcacggagccggaaatttccgatgatgaactggatgtgcaggaagaaccgattccggcagaccccagcgtgaagaatttcagctttacgaacgtagatgggcagatttactaccgcgaaaattcttttatgaacaaggtggaactgcctgccgtgacagcagagcgagtgctgggcatgatcgctctgcgagaaaccacccgaaaactgttggattgtcagctgcatgatggctcggatgcggaagtacagcttttgcagaatgaactgaaacagcaatacaccgcatttaaggcgcagtatggcctgatcaacagcaccgccaacaagcgggcgttccgacaggacagcagttattgtctgctggcatcgctggaaattctggatgaggagaagaatctcaaacggctggccgatatttttacaaagcgcaccatccgtaagccggaacctgttacctcagtggacacgcccagcgaagccctggcactttccattggagaaaaagcaaaggtggatgtgccgtttatggtgcagctctgcggtaaaccggaacaggagattacggatgaactggcaggtgcgattttccgaaaccctgtgacacagcagtgggaaacctcggatgaatacctgtccggcaatgttcgtgaaaaactggccacagcagaaacctttgcggcaaaccatgctgaatatcaaatcaatgtggattacctcaaacgggtacagcccaaggatttggatgcttcagaaattgaagtacggctgggtgcgaactgggtgaagccggagtacatcacgcagtttatgaaggaagtgttcaaaacaccaggctactatgccgggattgacattaaagcaacctattccgaaatttcaggtgcatggaacatttcgggcaagtcgctggatcgcggcaatccgcttgtcaccaatacctacggaaccctgcgcgtcaatgcttataagctgctggaagatgccctgaacctccgggataccaagatctacgatacgattcacgatgcggatggcgaccaccgtgtactgaataagcaggaaaccatgcttgcacagcaggcacaggaatccattcgggaagcgttcaagcagtggattttcaaggatttagaccgccgcgaggatttgtgtgcgacctataaccggattttcaatgcgattcgtcctcgtgagtacgatggcagtcatattcgttttgagggcatgaccccggaaatctccctgatgccgcaccagaaaaatgccgtggcgcacattctgtacggcaacaatacgctgctggcgcattgcgtgggtgcgggcaagaccttccagatgatcgctgccggcatggaaagccgcaggctgggcttatcgcagaaaaacctctatgtggtgccaaaccacctcacagaacagtggggcgcagacttcttacgactctatcccaatgccaatgtactggtggcaacgaaaaaggactttgaacccagcaatcgtaagcagttctgctcccgcattgcaaccggcgattacgatgccatcgtgatcggtcattcgcagtttgagcgtgtgccgctttccccggaacggcagaaagccattgtagagcgtcagatcgatgacattacgctggccttggcagatgcccggagcgaggacagccgcagttttacggtcaagcagatggaaaaaacaaagaaaacacttgaagcaaagctgcaaaagctgaacgaccagacgagaaaggatgatgtggttacatttgaggaactgggtgttgaccgtctgtttgtggacgagtcacatttctataaaaatatgttcctctacacaaaaatgcgaaatatcgcaggtatcgcccagaccgatgcacagaagtccagcgatatgtttgcaaagtgtcagtatctggacgaactgacaggcggcaagggcgtgacctttgcaacgggaaccccggtcagcaattcgatggtagaactgtacaccattatgcggtatctccagtacgataccttgcagaagatgggtctgagccatttcgatgattgggcggcatcctttggtgaaaccgtcacggcaatcgagctttccccggaaggaaccggctaccgtgcgaaaacacgttttgcccggttcttcaatctgccggagctgatttctctgttcaaggaatcggcagatgtgcagacagcggatatgctgaacctgcctgtgccgcaagcagagtacatcaacgaagtgctgaaaccgagcgagatacaggaagaaatggtgagttcctttgcagaccgtgccgaggctgtacgcaacggtaatgtgaatcccagattcgataatatgctcaaaatcaccaacgatggcagaaaactggcactcgaccagcggcttatgaacgagatgctgccggatgagccggaaagcaaggtcaatcgctgcgtggacaatgcgttcaaggtctgggaagaatctgcgccggacaagggaacacagttgattttttgcgatttatcgacaccaaaagctgatggtacattcaacgtctacgatgatgtgcgggagaagctggtggcgaaaggtgttccccgtgaagaagtggcgttcattcacgagtataacacagaaaccaaaaaggctgacctgtttgcaaaggtgcgcgccggacaggttcgtatcctgatggggtctacgccgaaacttggcgcaggaaccaatattcaggatcggctgattgccctgcatcatctggattgcccgtggaagccgtctgacctagaacagcaggaaggacgtattctccggcagggaaaccggaataagcaggtaaaaatctatcgttacgtcactgaaaatacgtttgattcgtatatgtggcagattctggaaaataaacagaagtttataagccagattatgacatccaagtcgcctgtccgtgcctgcgatgatgtggacgataccgcgctgtcctatgccgaaatcaaggcactggcaacgggcaatccctacatcaaggaaaagatggacttggatattcaggtcagcaaactgaaactgctgaaagccaatcacaccagtcagatttatagcttggaatcggatattgcgcgccgctatccgcgagaaatcgctgtggcacagggtcagattgaagcactgaaaaccgatatggaagcggcaaaaccgcttctggcgcaggacaaagaccacttcgctatggaaatcagcggtaaggtgtacagcgaacgcaaggaagcaggtgcagccattatcgaggcttgcaaggctttgaaagcagcaggcaccgagggcagaattggcagctacggtgcgtttgaactgcattcccggtttgacaacttcgataaggtgttccgcctgtccatcaagggtgcatggaactactcgatggaagtcggcaaagacccgcagggtaacattctgcgcgttaccaatgcgctggcaggcattgaaagaacgctgccgcaggtggaacgcagactggaaaccttggaacagcagttggcgcaggcaaaggaagaagccaaacgtccctttgcgcaggaagcggaactggctgaaaaatctgcgcgccttgcggagctgaaatctctgctcaacatggatgaaaagggcagtgaggatgcgctgggagtggacgaggatgcagcggaaaccgaagttgcagacaggccgcgccagcctgtgaactatgcaggccgcgttacagagcgcactgcggacaatgtgcggaaaccctctgtgctggcgcagcttcatgcaaaacagtcagagcgcagcgcagaaccgcagaaatcccagaagcggaaaagtcacgatattgaattgtaaataggataaccccgttagatctctgcaaggaatctaacggggtatttttgaaaaaggagggcatttgctgacattaacaccaatcaatctgaaaacggctaacgcgtttgtgcagcagtatcaccgccaccataaaccgacgcgaggacataagttctccattggcgtatcggacaatggcgcattggtgggggttgccatctgcggcagacccgtggcacggcggctggacgatggctacacgctagaagtcaaccgtctatgtacgaatggaacgccgaatgcttgcagtattttgtatgcggcggcataccgtgcagcacgggccatgggctacaacaaagttattacctacattctggacacggagaatggcagctccctgaaagctgccggctacacctgtgagggcagagccgggggattggagtggaacggcacaaaagcaccgaaacaggccgaccaatatccgcgccagatgaaaacacgatgggtcaagaaaaaggagggcttgcatggcagttgaccgcaaacagcagatgaaagaaatcacggaacggctggagcagggtgtaaaggacatttttacatcggaaatgtacacgacgtacctgcgcacgatggcaaaattccacaattacagcttcaacaatacgctgttgatcgctatgcagcggcctgatgccacactggtggcagggttcaacgcatggaaaaacaagtttaaccgctacgttaaaaaaggcgaaaagggcatccagatcattgctccggctcccatcaaggaagtggaagaacgcgagaaaatcgacaaggatacgggcctggccgtgctgaacgaaaatggtgagccggaaatggaacgtgtggagtatgtggttccgtgtttccgcgtgacgacggtcttcgatgtttcacagaccgatggggaaccgattccgtcgctggaagtgaacgaactgacggccagcgtcaaagactatgcgctgcttacggcggcaatcgaacaggtatctcctgtgccgatgcggtttgatgagatcgaaggggaagccaaaggatattacagtgatgcagacaaagaaatctgcattcaggtcggcatgggcgagagccagaccataaagacgatgatccacgaggttgctcatgcgatgctgcataacagcgatttcatgaagcagaacggcgaggaaaaagaccggcttacaaaggaaaccgaagccgaaagcattgcatttacggtctgctcggctctgggcattgacacatccgattattcatttccgtatgtggcaagttgggccagcggcaaggagataaaggaactgaaagattcgatggatacgattcgattgaccgcagccgattttctggaaaagctggaaacggcagtcgcggaaaggagcgcagagcgcatgaccgcgatgcagtatgcggaaaagttgattgccgacaaggagcaggaaaaaacgattttcgatgatgagcagcgaaacctcatcgtgaattttgctttcaagctggatgaccgggctgcaacggaagaactggtgaagggtctggcggctgcactggccgaggatgacaaagaagaagtcaaccgcctgatgtacgatgcacaagagaaaatcgaaaatctcccggatgggatgattggtctttccgaaatgcacgactacggctatttgaaagatgatgtgctgccgctgacgaaagaagctgcgttggaatggcatcgggctggcgagaaaatttatcctctgttttcggatggcacggcaggcgagtttgccagcaaggagcaaatcgcacagcatgatggtattttcggcatccgaacagatgtatggaagagtattctgctggagcagcaggaaagctatctggaagatgattttacatatccgcagttcccgttttcgcccatcaccagagaacaagccctgcagctgtacgatgaggggaagcagatctacttagtccgcacaagtctgcggccaacgattgtcacggaacgcgcagaaatcgagcgtggaagtgatgtgttccagatcgcaacggcagacctggagttggagaagagccgagaggactctctgctgcagggcagtgagaaacagttcggcatttaccagataacagagcgtgacccggaacacgactaccgtttcatggggctggactatgtggagaagaagggcatgacggttgcccgtgcagattatgacctgatctatgccgcaccgcttacggacaaggatacgctggatggaatctttgaacggttcaatatccagcgcccggcagactttacagggcattcgctgtcggtcagcgatgtggtggtactcaatgatggcagtacggtcaaagcctactatgtggacagcatcggctttgcagaactgccggattttttcaaggaaaggaatatgaatttgcagaaagaaaaccttttgaacgaagaactgcaggaaatcgaaatctttgataagccgggtcttttcagcaatggccgactgcgggatgaagatgtgccggagggcttatatcgctatgatctgcgcggttcggactacgacccaggccagcccattacagtggagaaaactgtggtggtgaaccatgcggcatctgtcctgatggccgaagaacttgaccttggcgcggaggggcgactggaactgggtgaggaagggctgaacttcacaggcgcggagttgaccgtgcgagagttcatggaggaacagcagcagaaaagaagtggtctgatccacggcgattccgaccacatcgcagtcgaggggcatctcggcacatggtatgctgttgatgaaacggaagtcggcggcgagaagttcttcctgctggaacatgaggaacacggcgatatggcggcttgtgttgcagtcgatgagcagggcaagctggtggcagaggatttgtggaacggcttcgatgaagattttcaggaggccgtgcagaaatatctctctgaaaaatggaatatgccgaaaaaagaagatgtggtatcggagattattgaaaaggctgcgcctgtgctggacaacagcgcacaggactattcggatgtgcctgtctactatgagccgttcagctatgccaaagaaaatgacgaggtggatttataccgcacttcctatcggctgaacagcgagtgcaagcaggcaatccatgaagcgattgcggacaactatgatgggatgtaccttggcgatggcgcagtcgatcaggtggtgcggcagtacggtatggagcgtgtggggtacattctggcaaatactctgcaccataaaagctacgatggccgcttttctcatagcaataaagaatggtcagagcaggtcagcaccccggagcataatgcagaccgcatgaccttccgcacggattgggtggttgacagccacccggctattctggatggctttgtaacaatgttcagaaaagaactggaagcgcagaaagaacaggaacagcctttcgtaaagcagttctatgtggtcgaaaatttgcaggccgcgcctttgaaaattgagcggttcggaaatctcaacgatgcaatgtcgcagtatcaggcacttccgaaccattacatgaaagctttgggcgtggagaagaatcctgatccaatgccgggttcactggatgttttgcagtgcaagaacggccttgacaccattgtagaggactataaaacggttccgggctgggataacccgtatatccagaatcatgttgtccagccgttgcagggggcgttagccgtgcaggatgtggagttggcatacgaattgccggatgcctattttcacatccagacctgcgacgatggcttcgactataccttatataataaggacttcacggaacgggatggcggtgtccttgaaacggatggagataagcctgtgcaggaggctatgacggagctgctggcagagttcggctgcgatgcggcagagggtaaagtcatggatgcggcagaactgcgggaacaggctgatacggtgactgaacagcaggcagaggttttgaaagaaaaactcgctgcagaaagacctgcgccggaagaaacgctcagcttttatgttgcggagtgtttggagtttacgtttgcaggagagttccacgaccatctgaccatggaagaagccttggaaacctacgacaagattccgtctgaacggatgaacgccgacaagtgcattggattctgcatcgaggaaaatggaggctttgttggaatgtatgagctggtcgtgaacgataaagtgcagcgcgagaacatcaattccatcaactacttcagggatgataagctggtgcaacaggctatctctgatatggaaaagctgatggcggcacgacagcagagtaaggagcaggaacgcggcagtacgaaaaagtctgttctggatgccctgcgcagtctgaaagccaagaaacaggagcagcctgcacaggaacaggataagccgaagaaagcgaaaaagaaagggatggagttatgagcaatgtacgctttgatgaactggaattgatgctgatggcgatgtttgagcagccgacactcaaagatacgattcaggtgttgacggaaatccagccgcttgtggcagaggatgcagagatggctgcgcttgtccagcaaacgatcccgaagatgcaacagttgactgagctgcagtttaaggggctggaactggaatggcataggccggaggatgatgcaggagaatgagttcggatatatttgtgatttaccagatcgacaattctgagaaaaatcgtgagtatcgctgccgcagttatgcgtatcagattgagcatggctttatgataaccgcagataattatggtacgggctattctggtacggctacgcgaggaatgggcgcggaagcgattcgtaaaaagatggaaagcattaacccggacaaattcaaaattagaaaatttggggtcagtgatgtcatcggattgactgcggcaggcaaaacatcttttttctatgttgataaggataggttggtgagattcaacggctttttcccaaagccccagagcggcacatacctgattcttgatgagggcggctatcaggtggcaggacaaaaaggcacatggctggtatcggatgaagtggaggtcgatggtcagcggtttgttcagatgagaagtgaacaaacgaagaatccaccaccgagcattattcttcacgagagtggagcctttgtgacgcagacagctttaggtttcgatggagaagctaccagaaagatgcgcgctttcatgcaaggcccaaaacctgaactgctgcaccatcagaagttctttgaaaacggcacagcggaacatgccaaagaatccggcacagagcaaaattacaatatgatagatggctgcgtcaataatgtgccgaaaaagccccggcgcattggcggcaggtggtcggtgcttgatcggctgcatattaagcaggctgagcggcgacaaaaagacaatacgccgcagcaggaacaggaaagaagccgaaaaagttaaaataccgtaatatcgttgagatggcttccccaaaaaggaggccatcttttatgcacgagttgagccagagaagctatccatctgatggaatcctcagcgtatacgatttgattctgataccaaagtgggtaatggaggaaattgaggattctacatacagaagcacctatgttgagcagcttcaagcacaagggtatcctattcgttggattgatgaaacaaagtaagagtaatatggtagaaaagggtcagccctagtctttcgcaggaaagaccagggctggctttttgttttatagagagtgttcgttctttcgggattgctgctgtttgcgctgtacttctcgttctgttcctagaatgttatctacattggcgcatacagtctggagttccctgtggtaatctttgaaatagtggtaggtgtcatactgggcatctttctgaatggtaagctgctccttttcagcccggaggtctttcatggtcgggaaccttccatctggggagtgctgctttaggatgcggagggcttcttcatatttggcaacatcctctgcatgagcctgacggaaagatttcttattgccggatttcaagaaatcaccatagactgattttgtagaaagatactggcctaaataacgaatctgctcattgactttttttaattttgcttcggtgaatttggcatcacttcgggctttcgccattttggattggatggtgttggtggtatcagaaagtttttcataagaatcgtatccatgctcctgcacataagcgactgtccgtgccatctgctgcaaattggaaatcttgactttctgcgcataggcgcggctctgctgtgcttttacgcaggtctgcaagtcaactacaaggcgcagatcggacttgatgaacagaatggccataggatcatctgctgcccaatgagggttgttccgttctttgttccgcgcattttctgcaaaaatgcggagaagcctgtcgcggtcataattagaaccgagagcgcgggcagaaataaatttctgtcggtcaacaggaagatagctgaatcgtccacgatggtcttttaccaaaattccgtattccgcttttaataaccgttgaaattcatcaaaggatgtggcacgttccgcaatgtcagaaatggcattgcggattttttctttatcagtttcaaaggtggtgtgcatgggggtgatgccatcgcccagaagttccatgtttgcaatatccagattcaactgcccgcgccgctgcgcatggtactcctgctgtgtgattttatccgcagcaggggagagcagatcgacctgatgcagcccttcgcgctggcaaatatccatcaaagatttttgcaggtgcttcaaatagtctttggtaaggtggtgcttgtatccagccttgcagtcgattggccgttcggtgtaggtctgaggctctatatcggatttgcgcaggctgttgattatgatgtgggtatggatgttgcctgttccattattgccatctgtatgggtgcagaccaaagcctgatgccccggaaaattagcttttgcgtattccagcccgatggcctgtgcacgttctcctgttaaatcgtggtcggcgttatctctggggtcatggctgataatgtagtggtggcttttgatttcatcgtaagtgttgttcttatggtactgctggtttaacagttcacattcaaggtcgaaagattcgggattgcagttcaaaccgtcaagataaaattcttcccgaagcagcatattcccgctttcatccagaacgggaaccagatgaaactcatcatgctggtatttcagatagtcgatggcactcccataattggcatttttacttgcgatgtgttttagaattgccacgatacacacctccaagctgaacgatttcttgccgcagttcacggatttccgcaatgcacctttttagttcttctaacattccgcgtgatgccagaccaccgctgtggaaatagcgggcaatctggttgagattgttcccgatgccggcgaccagcaccgtcaaattctgaatctctcccagatcggcaacgatattatagttgacttccagcttttcgcggagagcctgtttgcgtacaaaagtaccaatcgggtatccagcatctttagcatatccggctaccagctcatattccaattctgtgaaacggatgtaaactcgtttccccctatgaagcgatttctctttctttggtcgagccatagcataatcctcctgcattttatagttgcagaacaactcccgataagccgtaggcgttcggctgcgaacccatttatgtggagccggatagccaaaatccaagattttgtgcgtaccgtgggaatggggaacggaatccccatcaagattgccagccgggaaaaaccacgaaagtgagttttgagcggctatgggcgaatcttgcgctaagagagaaaaagccccacgacctggaaaatcgagaattgtccttatacctataacattctggaagcaccttttggcaaccacttgaaaaaatatttttgtgaaatttcaaaatttggttgccaaacaccccttttagaatgctataggtgaagggaggtatttgatgtaccagaaaatgacgcatacacttgaggatttgaagaaattggcagcgatggaacttcgggatgtgaaccgtgaagaactggtggacatcaacgatgtggaaatcaagaaagacctgtcgcagcgagaacggatggttgattttgtttcacagatcaagaacccttactgctatcttgaccggggaatggccgtaaagatcagttttgccggagagaaccgattggaggacacgctgaaaaaatgcgcaaggacacaccggaaatgaaaaaagaagaacgcagaagaaaattttcactttagcacattaaagcgttgacataaaccgtgaaatatgagataatggctttgggtcaaaacagaatatgctgataaagtcgataatttcttggtttattgtctgaacgacaaatagattaggaggttatcggctttttatgttttttcagggaaatgaaaaatacaactgcgccacatatcttcgattgtcgcgttcggatggcgaccagcaggagagcaacagcataaaaaatcagagagcgttgctgaacgattacatggggaagcacccggaattgcacaagttcgatgagtatgtggacgatggttacagcggcacaaattttgaacgcccggattttaagcggatgatgcaggacattgagaaaaggaatgtcaactgcatcatcgtcaaggatttatctcgtttcggcagaaactacattgaaacgggtcgttatctggaacgaatctttccattcatgggtgtgcgctttatcgccatcaacgatcattatgacagtgcagaggaaaacgatgataagggccgtattctgattccgttcaacaatcttatcaatgacacctactgccgggatatttcgctgcgcgttcgcagtcacttggatgtgaaacgaaaagaaggtcagttcattggcagcttcgcagggtatgggtatcgcaaagaccccaaagacaaaaatcatctgattatagatgaatacgctgcgggcattgtgcaggaaatattcaaatcaaaattgaacggaatgagttcacagcgcattgccagccacttgaatgaacttggggtcctgccgccgaacgagtataagagagccaatggattcaactatacctgcggttttcaggctgggctgaatcagaagtggacagtggtttccgtcaatcgtattttgaaaaatgaatcctatacgggaacattgattcagggcaaacgcaggaaaatcaattacaaagtaaaaaagagccatgatgttggaagtgaaaactggattcgggtagaagatgcgcatgatgccattatcagcaaaggcgagttccagcaagtacagcagttgttggaactggacactcgtaccgcaccatcgcagacaacagtttatccattatcaggttttctacgctgtgcagactgcgggcagaatatgattcgccgcacggtgacgaaaaacggaaagaagtatcaatactatcactgctctacctataagaatggcggcggctgcacaccgcacatgataaacagtgagaagctgacggaaagcgttctggctgcgattcggcatcaagtgacacttcttgtagaagcggaaaaggtactctccaatgcagagttggcaagcggcgaacagattggcataaagattctggacagccagatcactgcactggaagctgaattagaacggtacagtaatttgaaaatccgtctgtatcaggacttatgcgatgatgttgtcagtcgggaagagtacggagaaatgaatactcgctttgcgcagaagataaaagaggcacaggataagattcaggaaatccgcgaaaagaagcaggaggcattaaagcacgacacactgcttcctacttggttggaagaatttaagcaatacgaacatatcaaaacgctcgaacgtagggtcgtggtggaactgatcgaccacatagatgttcatagcaaaacagagattgaaattcatttctgcttcgaggatgaactacacagtatcacagaaaaattcatggaatatcaagcacatcatggaaatgaggtggcagaggaatgaaatgggtcagttatacaaggtcgatttccagcaggatcggagaagaaaatccatccaatacgattgcggagcagaatgagcgcattgcgcggtatctaaaaaagcgtgggtgcagcgtatccgaaaaatacagtgaccgaaagagaacagcagaagccacagagggctttgacaaattggtacaggatgggatggctcggaaatttgatgcagttgttgtggattctatcttccgctgtggaagaacccttccgtttgccattgaagcactgcagaggacgttctatccgcttggtatccaatttgcagttgtggaagatgacttttgcagtgcagacaaaactgccgaagaagttgcaaagtatttcaatggaaagaccattgataagattcgttcggaatttattaccaatcgccagaatcactttgaagaaggtacattgacccatcgacaggctaaatatggttatgcgctgtcggaagatcgcagaaaccttgttcttaatcctgagagcgcacaggttgtaaagctgatttttcagatgtatctggaagatatgaaaatcccggaaatcgcaagagcattggatgcacaggacgttccatctccacaaatccagatggcaaagaaaaaaaggtcaagaacaaaaatcaagtggccggattcaaccattcgctcgattttgaaaaatccactctatatcggaaagtgtacgctgacactggcaaaggcaaagcgagaattggaggttccggcgattgtttcagagacggaatttcagaaagcccagaaaaagttgggatctacgaggttgccttcgagaaaaaaggcccgaaaaaaaccaaatctgctcttcaaaaaaatctatgacaaggaaagtggaaaaggtctgctgtgcagaacatcagaagatgaacgccagcaaatctattcgtttgacaaggggtatagatgcttctctggaaaagcccctttcatcgaaagcgagaaaatctttcgagagattctttcagctttggaaaaagaaaaaatgcaagctgcgcatattgatagagtgctggactcgaatcctgagaaagtcaaacagtgcatggatgctggactattgcagtacagaaaaaaagcaaatgagatcgttacgcacttgatggccaaggacgatgaacgaacagcagtttatcgggaatacgagcagggatcaatttcactagaacaggtagaggagtatgaacatcagtatcaggtggcggtccagaagcaggaagcggcttttaaaaaagtaatgctggctgttaatgacatagaaaaagcatttagccatgggaatccctggttgatgaagttccgagcgatttcaattcctgaaacgttggagcgcacgcatcttaaagaatggcttgaccatgtatggatcgtagattttgaacaggtagaagtgatcctacaagaaagtgagtggaagagattcttcctggaagaatggctgaacaacggagaggaagattgtaatggcaagaaagagtagaaagaatatgatgccgcaggctgctgtgcaggaggccgtacagcaaaacgaaaaagaacttctgcgcacggcagcgtatgcgcggctgtcggttgagaacggcgggcatgaaacagaagattccctgcacacacagattttgcaaattcataattatatcagggaaaacccggaactgacgctgaccgatacctatgcagacaacggttttacgggaacacgttttgaccgaccagaatttgagcgtatgatgcaggatgtacggacaggcaaaattcagtgcatcgtagtgaaggacttatctcgatttggtcgtgactatatcgaaacgggaagctatctggaaactattttcccgatgctccatgttcgttttatcgccatcaacgatgattttgacaacatccggcagtcggatgtggatagccttgctgttcccatcaagaacatggtaaacagcttgtacgcgaaggacatttcaaagaaaatcagccttagttaccagatgcgccgcgagaagggaatccctacatcgtggtgtacaccgtatggctatcagttgaaccaacagggaaataagcttgaagcgactgaggatgcgaagtgggtcaaactgatctatcaatggtatcttgcaggagtgagtacaaacgaaattgcccgcaggttggaatttttagaagtagcaaggccgaacgaacggctgaatcgcaaattacatgagggagatgaccctacctataataaatggcaccccagtacggttcttcgtattttaaacagcagtgcctatattggagaactggtatctgggaaaacgcaaactgcatcatacaaagggattggcctccatccagtggaaaagaagaaatggcatattgttgaaaacgctcatgaagcaatcattctaaaatcggattttgaaaaagtgcaggcacggcgggaacagaataaggaaagacgggaaagggcgatggctcgttccaaagcaaccagagagaagtgttataaccatctatcgggaatggtttactgtggctgctgcagacgcaacatgacgtttgaacggcgtgtgcatggtacggtgaaagaaacgcactatggagtgttcatttgcaaaagaaagaagaacacgactccctgtgcctatcatgcggtgccggagaaaatgctgatgatggtggcgatggatcagattcatcatctggtgtctaccatgtgtgaagaagaaaagctggtaaaagacatgatgcgcggcagcaatctggattctgcccgttccatcaaaatgaaagaaaactctatcctgtttcggattcaggaagccgaagaacggcggttgcgtttatatgaggactataaagctgaaattctggacgaagatgaatatagtcagctaaaggaacactacatagcagaaaagcagcggttggaacatgaactgcaaaagcagcgtcagcgcgcattggaactggaaaagagaatcaaaatctgcgatgcgcagatggagcggatgcgcgggattctgaatcaaaatgaatttgatgaagaactggtgcatgaacttatcaagagaatttatgtgggaatggacaattctgtggaggtcgaatttaagtgcagcgacccctatcaggaagtgcttgcaatcatgtcggaggttcagaatgaatgataaaattgcaatctatctccgcttatcattggcagacggagatttgaaaaagggcagcaaggatgaaagtaacagcattgagaaccaacggatgctgctccacgattacattgggaagcaggaagatttatttggcgagattgtagaatatgtggatgatggctatactggaacaaattttaatcgtccggcttttcagaaaatgattgtggatttgaagcagggcgatataaaagtcatcatggtaaaggatttatcccgccttggtcgtgactatatcggtgttggcgattacattgaacagatttttccgttgatgggagttcggtttattgctgtgaataattcctttgacagcatgaaactgaacaacggaacgccgggaatcgaagtggcggtcagcaatctggtgaataatatgtatagccgggatattgcgaaaaagattcgggctgcgctggaaacgaactggaagaacgggaaagccacctgcacgaatgttccttttggatatgtgtggaacaagaaaggtgggcggcggtgggagattgacccggaggctgcagcctgcgtgaaaaaagtatttgaattagcattgtccggccgcaatacaacgcagatcgcctacggcatgaacgaattaaatcttcctacgccgggattgtatgcgaaacgaaagaatctgctgatgggcagcaatcctattattgccccggacagtgaaatgttatggaacgcggcaatcgtgtggagaatccttagacggtatgaatacactggtgcgttggttatggggagaagaaagaaaattgatgtgaatactacctctgttcggacgctcccggaggataagtggatcatcgcagaaaacgctcatgcggccatcgtgacaaaagatgaatactaccaggcacagaaagcaatccgtaacgtaactccaattcaatataaggtgggtgatgattttgcgttaaaaggaaaaatctgctgcggaaactgtaatcggcagcttcgccacgaaaggcaatatggggaaatggttttctattgcggctataaacggtcagccggaaagttctctaaatgctacggcggctattacagagaatattcggtgaatgcaaaagtggctcgtgcgataaaaacagtattctatgcgctggatgtggtaaatcagggaatgcaggaaaagcagtctatcacggtgcgctgcatggacattgaggacttggaaaagcaagcggaagccattcgggtagagcaaatcaaactatatgaatcgtatgcggacggtgtgctgctgcgagatgcgtacatagaaaagaaaaaggctctttcggaaaaactggctgcattgcaggatagcatacggacagaaaaggaagaacaggagtgtgccgatgaactggatgaagaaatccgcgctctgacaaaacaggccagtgagaaaacatacatcggcgggctgacaaaagaatgtgtggatgcttttgtcagcatggtttatctgtatgacgaccaaacgatgaaaatagagttcaactgtgaggatgtgattcggagagcgttggaaaagtatggcgcataattggatggaagaagttgcataagaaaaagaatacccgtctgggtgagaggattgatataatcttctcgaccaggcgagtatttcattccgcaggaatgtgtctattagaggctgagggcttccacccatgcagacaagtcggctttgctggaataggaattgaataccttaccatgcagcagctttgcaccggggcagctcggcgcaagtttttcattggtcttacccatgtcgctgccgccagatgtggcaaaggggatgattgttttacctttcaaatcatagctttccagaaatgtattgataatggtgggagcaacataccaccagatggggaatccgacaaagatggtgtcgtattcgtccatgttatcacgcttggcagcgatggcagggcgagaggtaggatcgctcatttcgatggtgctgcgggatttcttatccatccagttcagatcggctttagtgtatggaacttccggctgaatctcaaaaatgtctgcaccgatagcatcagccagattttcggcaactttcgctgtgatgccgctggcagagaagtaagcaacaagtcgtttgctcatgacaaatgcacttcctttgattgattttcatggtttaagtatagcacgttgaatagggagcatcaagtaaggctgagtggacgaatgtgctaatatcgcaaatgaaataagcacaaaagaaagtttgcgttgactttcgtgcttatttggaatacaatataagcacgaaggtgaggtgacgcttatgatgaacatgaacaatttggctcaaacacatgagattttaacaccgcagcttgcaacaaaagtaggtttaacgaaatttgagttttataaatatgtaaaggccaatgaatacgagcaagtcagacatggcgtatacgcagcaaaagatacttggattgacgaattagaaatgctgcaccgccgctgcccgatgggagtgttttctcatgatgaagcgttctattattatgggctgactgatcgggaaccgcttgttcatacactcacgatttatagtggatataatgttcaccgcttgaaagaggatggctataaggtttatacagtaaaaaaggaacttcttgacgttggcaagcaaatcgtaaaaagcaatcagggaaatgaaattcctatgtacgatttggaacggacaatttgcgacttggtgcggagtagaagttctatagaagtacaggatttcaatgcagtattaaaagcgtatgtcgggagaaaagataaggatcttaataaactgatgaagtatgcaaagctatttcgagtggataagatcatccgaaattatatggaggtactactgtaaatgggatttacacctgaacagataaaagggcgtatcaagagcgttgcaaaacagaacaatgcagacgcaaggacactcatgcgaatctatatgatggagcgttttctggaaagactggcacaatcagaatatcgggataacttcattatcaaaggcggaatactagttacggcaatgattggtgttgcgcaccgttccacgatggacatagacaccagcatgaagaatctaaatctgtctgcggaggatgccttgcgagttgtcaatcaggtcaaagatattgaccttgacgatggtgtttcttttgatgttaaagacgtttccaatatcatggatgaaatggagtatccgggaatccgcgttaccatgaacgccaatgtgggaagattgattacgcctttgaaaattgacatttccacgggcgacgtgattaccccacgagcaatcgagttcaattatgatctcttgctggaagatcgttctatcagtctatggtcgtataatttggaaactatattagccgagaagttgcagacggttttggcgaggggtatcttaaacacccgaatgagagatttttacgatatacggatgctgctcgatacatacgaagataaagtcaataaggctgttttgaaggatgcttttgcagcaacttgtaaaaagagaggaacggatcatctgcaggagcaggccgaggagattatcaaaattattgaagcagatgaacagcttcaagtgctgtggagagcatatcagaagaaatactcgtatgcagcagaaattgattatgccagtgtgataagcggcgtaagaaaattgatggattggattcgataagtaactattgaaaatagaatagcgagtaaagccctacaaggcttaggtcggttcacagaactgactaaaagccttgtagggcttatttttttgcgattttttctaaaaagtttttgcccctatcttgacatcagggggccttgcaacggtaagcgcctcggcttttgcggcactttacagtgcatttggaaaatacgatgtggtgcatatccacgcagagggaccggccttcttctcatggctgccgaagatatttggcaaaaaggtggtagttaccatccatggggagtgtgaaataatatggacaaccagagaaaagcctgatttcatgcaggtttacgcggcttgaccttttcacctcaacctgtttctgcctgtcatggtgcgttacagccagcgtgatttcaggtgctaatggcttctggttgcgctctatacttaacccacccacagcgaaagctgatagagcagaaaacagaataaggaggtacgaaggcgagcctgcgtatagattgctgcggcaatctatatacaggcttgttgtcgtgcaaggaagaacaacataccggggagaaataaaatgagaacaaaaaatgtgacagagaaaaatatgaaggtttgtcttgttggctcatctggcggccatttgactcacctttatatgctaaagcctttctggaaggataaaaatcgtttttgggtgacattcgataaggaagatgcaagaagccttttagagggagaaaaggtatacccttgttacttcccgacaaaccgtagtattaaggcgctcatcaaaaatacaaaaattgcgtgggatgtgctgcataaggaaaagcctgatttgattatttcctgcggtgcggcggttgcagttccgttcttctatatcggaaaaatgatgggggcaaaactggtctatattgaagtctttgaccgaattgataaaccgacaatgacgggtaagatggtttatcccattgtggacaagtttgttgtgcagtgggaagagcagaaaaaggtttatccgaaagcggttaaccttggcagcattttctaagtaggggtaggaagtaatgatttttgtgacggtaggaacacacgaacagccatttaatcgactgattcaaaaagtagatgagctgaaacgcgatggcattatcaaagatgaggttattatccaaactggatttagtacatacgagccgaaatactgtcggtggagcaaattgattccgtatcagcagatgattaaaaatgtggctgatgcccggattgtgattacccacggtggcccggcaagttttattatgccgttgcagattggtaagacaccaattgttgtgccgcgccaacaccagttcaatgaacacgtgaatgaccatcaggtggaatttgcacgaaatgtttcaaagcgcatgggcacaatcattgatgtagaagatattgaaacgctaggagacattataacgaactacgaccagattgtagcaggaatgggtcatggcatgaatagcaataatgcaaagtttaatgaagaactcggaaagttggtagagaaaatgatggaggaaaagaaatgattcctaagaaaatccattactgctggtttggtggaaacccgttaccagaagacgtaaaacgatacatagaaagctggaagaaatattgcccggattatgacttgattcgttgggatgagtctaactatgacgtacataaaaacgcttatgtagaactggcttatcagaataaaaaatgggccttccttacagattacgccagattagatattatatacgaacacggtggtatttatcttgatgcagacgttgaactgatacatagtctggatgatttgctgcaaaacagttgctatatgggaatggaacaggttgggacggttgccacaggtcttggatttggcgcggaacccaagcatccatttttgcgtgaaaatatgaggccctatgaagaacagaattttgtccaagaagacggaacatttaaacctccaatttgtgttagagtaacgacaaaattgttgaaggatcaaggcctaagaggtgagaacataatacaaaaaatacaagatgtaactgtttatccgacggattatttttgcccgcttaaaatgggaacaaataaacttacgattactgaaaacacatattcaattcatcattatgcggcaagttggtatactggaaatgcattggtacgtaaaataaagtactatctaattccggtgaaaatatttgtaaagagatatatcctacggagagaagaatgaaaacaaaaatcaagctgtttgatatatatgtatttctcattacgttattcaaaggatttggagcggaaagcaataataaagggtatgttctagcatttgtgataggctgtatagcaattgttacaaagatggcgcgcgaacgatataccacaaaagaactaatggctgtgctgtctatttttttgattggtatattagattttgtggtcggacatacaacaacgattctttttacggctgtagcaatctgtggcttaaaaggtgtggaagtcagacatatagttaagatttctctttggacaagggtatttgcttttttgtgcttgactatcggttcggaattgggaatagttgaaaataaaataatccctttctggcgcggaggttcgattatcgagagatatgcacttggatatagtcatcccaatatggcacaggcttcgctaacagtaattatagtgcttgctttatatctgtataataaaaagatgcatatttggcagtatctggcttttgggctgctgagttatttggtatatactcttacttactcaagaactggacttttgattgcatggatttgtatactgatccagatgctgtgcagaaatgaaaaaataaaaaagaaagtggtacaagtatgtaagtatagctaccttggtttctttatccttacgattggaatgggaatagcatatggaaaagtatcgataatgacaaaaattgatgtgctattaactggaagaatacagtacatttcggaattgattagacatggattaccgccattgataggcacaacacagttcaattcgtttgttaatattgacaatggatatattgcattgctgtatcaagggggaatattggcgtttgtctggttcagttattatattatgaaaacatacagacagtgcttgaaaaatggaatgtatgatgaatgcacattcatgtttttcttttttttatacgccatgacagagagcttcttcccaagtatagctgtcaatacatcacttcttcttataggaatcagtatttttggagatagaacgaggaatcaaataaaatgaaagagctgactatctttacgccaacatataatcggtgtgcgaaattaaggaaactgtatgattccctagtcggtcagacggacaaaaatttcatctggataattgtggatgatggctccactgatgaaacagggaaaatgatatcagaatggaaaaagagcagcgaatttgaaattaagtatatctatcaaacgaatcagggcaaacatatcgccatgaaaagggcttttgagcaatgcgccacagattggatcatttgtgttgatagcgatgattaccttgcatcttctgcggtccaagagatgctgacagatatgaaaagtgtaccttcagattgtataggatatatctacccccggaaatcaaaatcgttaagagcatcctcttttccacgggaatcaatgcaaatatcaataatggatgcaagcaatatttacggaatggtagaaacggcaatcttatttaaaagtaagtacttaaagctgattgaaattccacagtatcaagatgaaagatttctaagcgaagagattctgtacatacaattagacaaatttggaaagttttgcacgagaaatcaggcattttacatatcagaatatcaaagtgatggattgacggcacatatttttcagttgtggaagaaaaatccgaaaggaacgatacggcttctaaatgatcgctatcattacagcaataagtatgctggggattttgcgttaaaacagaaggttaaagcaatcttaaatttaaatggcgtatgtatttcaaccaaacaatccatatggaagtacacgcccaatatgttgctgtcagctctattgtacattccatcgattgttttagctgaaattcgattttcaaaataagaaaggaaaactgaaatgagcagcgtaaacagaggattggttagcattgtaattccgtttcataatgctgagaagtatatcgaaaattgtttaaatcgtgtaaaagaacaaatctataaaaacatagaagtgatttttgtggatgacggatcagatgatgacacagtagcgattcttcgtaaaaatagtgatccgagagtaaaattgatttcacttcaaaaaagtggagtttctgtagcgcgaaatgctggtattcatgaggctaaaggagaatacattactttttgggatattgatgacaaaccacattcagatttcgtttcaaaatttgttgaagatatctgtgaatataaagtggacacggtcatcagcaattatgatgatgtattcgcgggagaaaaacatgttaaagttgtgctaccttgggaaaaccaagtgattgaaaaagatgatatcgataatgtcctgattccacgaatgatttatcaattaaaaaatgaaaatgccattagagggttggtatggcgtacatttacgcgtacagacgtgttgaaagacaacaatattttgtttgataaagaaatcacaatggcagaagactttattttcacattggaattgtatcacaaatcaaaaaatatttttgttgagggggatagtctgtatgactatatccgaagtagtacttcaacaatgaatacatatgataaaaattgtgtggataaaagcataatattccacaaaaaggtggtctcgctgttaaagagattgaagctatatgatgcgaatagaaatcgctatgaggcaaatagactgtcgatgtattcagtttccatcagtaattgtgtaagaaatgggattgtgcatgagagcgcactgagtgatttgcaacgaatgcatgaaatgttaaagaatgataacatcagaatatggcagtctgaagcgccattaaagataaaggtaacaggctgccttttgaaattaaagatgtatagattgctgattgtgatttataccttaaaagaaaaaaggagaatatcaaaatataactgaaatatggaaacaaaaagcattagattcaatttgctgatgaatgttattcttaaagcatcggcatttatattcccattgattacactcccatacgttgcaagagttttgggtgttgaaaataatggaaagatatcatttgcaacaagtgttattagctacttttccctcttttcccaattgggaatccccacatacggtatccgggcctgtgcaagagtacgtgaatcgcctcaaaaactaaagcaaactgtaacagagttggttacaatcaacgcgatttttgctgcaatagcttatattacgcttgccgtttcgattttcattgtgccaaagtttcacgaacagtctacactgcttatgatttcctcggcacggattttactgacgcttattggcatggaatggttttatcaggcaattgagcagtatcagtatattacggtaagaaatcttctgtttaaatttatttcgttgctgttgctttttgctctggtgaaaaaaccggaagattatttgttatattgtggaatcaacatttttggtgtatatggttcgtatattgtcaatctgatttattcccaaaagtttatatcaaaagataaaattgaacgattgaatctccgacagcatatgaaaccgatttttacgttttttgcattatcactggcaatttcaatctatacaaatatggacactgtaatgctgggctttataaaaggcgatgtagaagttggttattataaccttgcaacgaagataaaggatgttctggtggcggcattgactgcacttggaacggttcttcttccaagactttctttctactattcaacgggagaaagccataagctaaagaaattgctggggaaatctatgcactttacggcactaacaacgattcctgcagtactattttttaacattatttcacgagaagctgttttgtttttggggggagagcaatacttgccatccgtggcttgtatgcaaattgttaccttagcaatcttaccaatatcgttcgctaatgttgcatgtacgcaaatactagcacctatgggacgtgaacggtatacaatgtattctacgattgcaggtgcatttgttaacctagtagcgaatagtgttctgattccgcaaatgggtgctagtggtgctgcgctaggaaccgtgattgcagaaattactgttgccataatacagatttattatgcaagagatttttatttgccacttttaagaaaaaaggattttggaaaaattgcaattggatgttttgctgccatagcagcgttaggccttctaaatcaagtgatttcacctgatgtggcgattgtgaaaattgcagtggaatttggagtgttttgcatagcgtatgcggctgctttgctgttgctaaaagatagcattgcaataaatgtgcttgataacatacggcatagacttgaaaagctgaagtaacaattatatgggagaatgaaagtgaatacaacattacttatcatggcagccggaatcggcagtcgatttggaacagggattaaacagttggaacctgtggatgcttccaaccatatcatcatggactactcaatccatgatgcgatcgaggccggtttcaaccatgtggtctttatcatccgtaaagatatcgagaaagagttcaaagaggtcatcggtgatcgcattgccttcatttgctcttctcataacgtaacagtagactacgctttccaagatatcaacgatattccgggaactctgccggaaggccgtacaaagccgtggggaacgggacaggctgtgcttgcagcgaaaaaggtcatcaagactccgtttatcgtcatcaatgcagacgattactacggcaaggaaggtttcaaagccgtacatgagtatctggtgaatggtggcaagtcctgcatggcaggctttgtgctgaagaacacgctgtctgataatggcggtgtgacccgtggcatctgcaagatggatgatcagaacaatctgactgaggttgtggaaaccaagaatatcgtaaagactgcggatggggcagaagcagacggcgtgtctgtggatgtcgactctctggtttccatgaacatgtggggattgactccggagtttctggatgtactggaaaaaggtttcaaggattttttcgagaaagaagtaccgagcaatcctcagaaagccgagtatctgattccaatcttcatcggtgagctgctggagcagggaaagatgtctgtgaaggttctgaaaacgaacgatacctggtacggaatgacctaccatgaggatgtcacagccgtaaagggcagtttcaaggagatgctggagaacggcgtgtataaggctgacttgttcagtgatctgtaaacgacgatgaaagaaacgattgatttactcggaaagatcctcacaaacatcctgactgctctgtatgagccgtttggtttttcactcctgttttccttcctagccatgtttttctacctgtatgcgtatgaatctattggaacaggaaaaggctggaagattgccatgatgacatggtatcagaagttcaaagaggacgtgttcttcagaaaactattcttcttggcctttgtaacttcacttattctgttccgaactttgttaaaccgtcagaatcctttatccgatgtcatgggcgattggggcatctgggagaccgtgaatggcgaacagaagctgaccaccgagtgcatcgagaacgtgatcatgatggtgccgttttcagcagtagtgatgtggacattcggagagaaaattggaaacggctggaagaagatactgcgctatagcgggaagatagcatttatcttttcagtaagcattgagatgttgcagttattgatgcggttaggaacgttccagctatcagacatcttctataacacagtcggcggagtgctaggcgacgtgtgttactgtggaaccatgaaggcaagaaagcgtctgtaaaactggatgaaattgtgatatactgggagcggtagctccctacgccactcgaaactttgcacacctctacgcggtgagcggcaggcaacacagtatggattactgtggctaagaatgcgaaggacaatgtatgaaaatgttagatgagtatgactactataataatagataaagtaaagaaaaatttagctgatactgtatttgatataaatgcggtagtcttttgctcgactttaggaatcgctgttctcatgacaatagcgagcgttgttattacaaagtgcgggcttgtgatgtttgatgtggatcaaacgcaaatgagtacgttatttacaacgacggcacaaatagtaggtggcttgtatggactaacgctaactgcatatgtgttttttgttgataaatttcgagactcgacaaaagatgatgaaacactgtatgatgcaactaatgcggttttgtcaaatctctttgcagggttgatatccatatcaattctgtgtgaggtgattattgtaacatcgttgtttggaattgctaatctgagcaggttatcttctgtagagtactggctcataaatgaaaatgttcttatttttgttctggaaattgtggcaatcctattttttggcgtacaattacttgatccaaagaaactcgataaagaattgaatcgaatgaaaagagcagatgacaagaaaaactcgacacagaatgctccagccaaaaaagaaaatgttgcggaattctttgaactttataataaacttgaagcggatatattgtcaattgcccaacactatgttccggtggattttttgaaaggtagagcaggcaaaccgggaattattagagggctgcaaatattaaatgagagtcagatcatcaataacaatgttagggtactaattgatgatttaagaaagtacaggaactctgtagcacatggacttgaatgcagtgtgacagacagtaggcttgaggaagtaagaaatattgagtctgccatgggtcaaattagtcttttattggcagaaagaaaagaaaatacagaggattgggagaatgctataaagcggttatatgatctgagcagtcaactgtaataatttcaggagagtatactgaaataatctttttaaccctcaaaccgtgtgggtgtggctacaaaatcccatccatacggttttataatagatagattgtttcatatcgaacaaatatacacgtttttcattccatccctcaaaatcacttccggtgaaatttcagcaaaagaacagcaggggagagcataggcaaagtagggactgagcaaataaacagcaatgaacagcacggataagaagtaatcaagtccgtctacagattaaaataccttcaatcgcttcaaaatttattcttcaaaaaacagaggtaacccatcgcccaagccagtccatcaatgcaccaaccaaacaattatccacctcatcaccccaccctgaggagcgcatctgggcagggcgaacgcccccggcggaagccccgggccccggacgctccgaggatcaagcacgacaagatgaaacaattttacatggttgacatgaggcgaaaaatgtgatactatcatcttatcaaaaaagtgcgaatccctctcgctcgcgaaggaaaaatctctctcgcaatgaaaaataaaacgatacaacgaacaaaaaacgactttgccgaaggctggcagacacgagggacttaaaatccttttctgaagacagagtatggggttgcccccgccggagacattgaaaatctcagaattgttcgttgactcgaatgattgttggactttctttttgctctgctttctggaagctttggagagacgagagaaatcattcttgcacagataatcccgtatggacgcgtttacaagaacctttctatgcggggctatggtgaaatatttttatatcaaacagactgcccccaaagcagctcgcatcaaatcgcgctgttttgggggcagttttacgctttacggggaatggaaggggcgctgtcgtccgtaaggccgagaatataatcggtactggtatggtagagaccggcaagctggatcagcacctcggtggggatatcccgcttgccggtctcgtaattggagtagcagacctgtgtgcatttcagatacgccgcaacatccttttgcagcagatcacgatcctcccgcagatcccggatacgttgatacatggtatttacctcaaaggctttatttaaggtaaagtataggcacaacgaaatgttatattgacatataaaacaaaatgttatatcatagtatcgcgccgggaacagctgtgaatctccggcgcaaaaggggagagcatcatgaaactggaattccggcagacggtgacctgcaaccaccttacgcttgcaagggtctgcaaaactatcgactggcagcagccactgccccggtgcggagaatatgtggccgggctggatacgctggacggcgaaccggaactgccggtgcgcaaactgctgcaccgggcacaggacggcggctgccttgcggagctgccgggcttcaacattgcgcagctgaggctttcttaccgggagctggagcaactggcagcaaaaaaaggctggacgctgcaaaagctgtaaaaaacttaaatttccctcttgcattctggccgattcgtgctataatagtaaggcaatcgtttccaaggccgctcgacggggtagccgatattgaaggttgtgatgggcacatacattaaatatggccccaatacgtcagaaccagaattgaggtgaaaagaatgaaacagggtatccatccgaactacgttgactgcactattacctgcgcttgcggtaatgtcatcaagactcgttccaccaagcccgagatccacgtcgaagtttgctccaagtgccatcctttctacactggcaagcagaagctggttgacaccggcggacgtgttgagcgcttcaacaagcgtttcggccgtaagtaattataggctatctcatgccgcttccttcgggaggcggcatttttgcgttttgcggtggcaaatatttcgttttcccacacaggattgtcttaatttaaacacattttccatctaaactaaagcagttccaaaccggaaagcgctggttctacgccgctttccacaaaacagcttctgaaataaaaggagagtttgctgtgatcgaagtttctcacctgagcaagtcctacggcagccgccctgccgtgcaggatctctcgtttacggtgccggacggccagatctacggcctgctggggccaaacggcgcgggcaaatccaccattatgaatatccttaccggctatctggcgcccaccgagggcgaggtaaaggtagccggcttccgtctgcctgagcaggcgcagcaggctaaggcctgtgtaggctatctgccggagcagccgccgctctacccggaaatgactgtgcaggagtatctggactttgtggcagagctcaagggagtcaagcgtgcgcagcgcaagcagcaggtgctggccgctgcccgccgcaccgggttggaggaagtgttgccccgggtcatccgcagcctgtccaagggctaccgtcagcgagtgggcattgcgcaggcgctgctgggcagcccgcagcttattattctggatgaacccaccgtagggctggaccccgcacaggtcatcgagatccgcaacctcatccgggagctgggcagggcgcacacggtcatcctttccagccacatcctcagcgaggtgcaggccgtgtgtcagcaggtgctcatcctctctaaaggccgtctggtggctgtgggcagcccggaggagctgggcgagactctaaatcccggcagccgtctgcgcgctaccgcgcagggcgagcccgacaccgtgctggccgctgtgcgcagcgtgccgggcatctgcaaggtagaactggaaagcgctgcggacggtcaggtcacctttaccgccgagagcgaggacgccgccgaccgccgcgccgccgtgtcccgggcactgaccgaggccggctgcaccgtgctggcacttgccgccgagaaccgcagtcttgaggaggtattccttgcgctgaccgaaaaaacgccggagcaggaagccccggcagaaggggaggagaattgagatgctggccatctttaaacgagaactccgcagttgctttcacggcatgatcggtgcggtgcttaccgcctttatgctggcggctacggctatctattttgtggcgctgaatctgggctatggcctgccggattttggctactacacgctgtgccgcaccatttttgtgctgctgctctacatcccggtgctcaccatgcgctcctttgcggaggagcgccacagccgcaccgaccagctgctgcttacaagcccggtgtcggtgggcggcatcgtgctgggcaaatattttgcgctttgcgtcatttttgcgctgccctgccttgtggatgcgggcatgatccttgtgctgaaggcgctgggcgctaccggcaccagcacgctggccaatttttccgcgctgctgtgctattacctcatgggctgcgccgccattgccatcggggtgttcctttccagcctgaccgaaaaccagatcatcgccgctgtgtccggcgtggcggcgctgctgctggcttatatgatgcccagcctgcgcaccatgttcaccactggcagcgcggtggcgctggcactgttcaccgccattgccgctgtgctcagcgtggtggcagggctgcgcagcaaaagctttacgctgggctgtctttcctttgcggggtgctgcgtggcgcttacggcgctgtttctgctcaagagcagctggctgaccgaggctttcagtgcagtgctcaacgccctgtgcctgtttaccccctttgaagaatttgtcaacagcagcttttccatccccacgctggtctactacctgaccgtggcggcggtgttcctgtttttcaccgcacaggggttggaaaagcgccgctggaactgagaggaggccataacgatgaaatggaacaagaacgcagcctcccaaaagggcagggtgttccgcagcgggctgctgtccaccgccatgctggcggcagtgctggtgctggcggtgctgctcaacctgctggtgcgggccatccctgcaaaatatacggagttcgacctctccgaggccaaaatgtacaccctgagcgacagcaccaaagcgctggtggaggggctggaaaaggatgtgcatatctattacctctgtgaaaccggcagcgaggatgccatcatcacaaagctgctggaccactacgccgccgagagcgggcacctgagctgggaacagaaggaccccaccctgtacccaacctttgccgcaaagtatggcgcagagaatgtttccaccggcagtctgattgtcacctgcggggagaacagcaccgtactggatgccgccgacctgtacgagtacgattataccgactactacaccaccggctctgccagcgtgacttttggcggcgaaaagcagatcacctctgccatttataagctcaccgcagcggggcagagccacgcctactataccaccaaccacggcgagcagaccctgaccgactccttgaccgatgcactggacgcccagaatatcgacgcccagccgctggatctgctcacgagcaccattccggaggactgcgacctgcttatcatcaacgcacccaccagcgattttaccgcaggggacggccttgtggatgagatcagccagctgcaaaattatcttacggcgggcggcaagctgttgctgaccagcagcgtctacgcccagaccccgcagctggacgccgtgctggcgcagttcggccttgcccgcgcagagggcatggtggtggagggcgacagcagcaaggcactgtataactctgcatggtcgctgctgccggactacggcacgcctaccgagagcaccgcgctgaacggcgtgaataccagcacccatgtcatgctgtcggtggcgcagggcatcacggtcactgagaccgagaatgtcaccgccgagccgctgctgaacagctcctcctctgcctacgccaaggccgacatcaacgaccttaccaccatggagcgggaggacggggacgcagatggcccctttgcgctggctgtctgggcacggaacgaggacaccggcgcggagatcctctggatcggctgccccaatatggataacgagcagctttatcagtccatgcctggcaacctgaccttcctgcagggctgcgctgcctcgctggtagggcaggatgtccttgtggacaccaaggcgctggaggccgagcccatcacggtggcaggctccactgccgcagcactggggctgacctttgtgttcgtgctcccggcggcggtgatcattgccggggcagtggtggtgctgctgcgccgccgcagataaggagaccgccatgaaaacaaaaccgtgtgtcctgctggcgctgctggcagcggcagtgctgctgggcgcggcattgtgggcgatgatctgcagcaacgccaaggccgagcaggcggccagcgtcgccgccgagggcagtatcccactttccagctttgccgccgaggatctggagcagatcgagtatacctataacggccagacctacaccctgcaatattccggcggcagctggcagttggcacaggaccccgcctatcatctggacgagagcgcctgcaacaccatgcgcaccgccctgatggcgctgaacgccaagcgcagcctgacaccgcaggcaggggaggactacggtctgaacagcccgcaactcaccgtcacggttacggcggcagggcagagcactaccctgaccttcggggcagaaaacccggtcaccgaggatctttatgtgcaaaaagccggggacgatgccatctacaccgtcagcggcaacaaagccgcctgcttccagctggataaggctgggctcttcggcagcttctgccccaccggacttacggcctctgccattacgcaggtagcctatacgctggcagacggcacctccgtcaccctgaacgccgtcagtgagccgaccgaaaatgctgacagcgcttcttccactgcctacgagacggtgtggcggctggcctctgaccccactgccagccttgcacaggataaggtgcaaagcctgctgtctgccctgtgcacctatgccaccgctcagactacggacgcagaccttgccgcctgcggctttgatgcaccggtattcaccgccgcagtcaccagcgaggatggctccaccgtgcagctggcctacgcctgtggtacggatgggtggtatctgcaagtggagggagatacctcggtatacacagtggatataagcactgtgcaggcgcttctgctgacggaaagcgacctgaaaacgcaggaataattgctttgatacgctgcaccgaaaccaaggtgcagcgtatatttttttgcagctttttataaagttgcggcaaacatcggcagagtgattgacaatccgactgtgattgtttattataaaccgtgacagggtaagcccgccgcgcaagatcatgcttctgtgcggggcggagcatcccttatacgcaaaaaagatggggcaggttccctgtcttttttcgtatctgagaacaaggaggataacatataaaatggacaactcggtggtcgtttcactgcgggatatcgtagtggaatttgatggacagcgcattctggatgggctgaatctggatatccatgacaaggagttcgtgacgctgctcggttcctccggctgcggcaaaactaccaccctgcgcctgatcgcaggctttctggagccgaacgccggcaaggtgctgctgaaaggggaggacattaccggtgtgccgccctacaagcgcccggtgaataccgtgttccagaaatacgcgctgttcccgcacctgaacgtgttcgagaacgtggcctttggtctgcggctcaaaaagctggacgaggacaccatccgccgcaaggtgcgcgatatgctggaggtcgtgggtctgaaaggcttcgagcgccgcagcatcagccagatgtccggcggtcagcagcagcgcgtggccattgcccgcagtctggtcaatgagccggagatcctgctactggacgagccgctgggtgcactggatctgaagctgcgcaaggagatgcagctggagctcaagcgcctgcagcgcgagatgaacattacctttatctacgttacccacgatcaggaggaagcgcttaccatgtccgataccgtcgtggtcatgaacggcggtaaggtgcagcagatcggtaccccggaggatatctacaacgagccgaaaaatgcctttgtggcggactttatcggcgattccaacatcgtggacggcgtgatgcacaaggactttctggtgtccttctccggcgtggatttcccctgcgtggaccgcggctttgcccgggagcagagcgtgcaggtggtggtgcgcccggaggatatcgaggtggtatcccccgtggaaggccagcttgtgggcgtggtgaatgatgttatcttcaagggcgtgcactttgagatgcacgtggagtgcgaaggccgcgagtggctgatccactccacccgcgcctgcacccccggcgagaccatcggtatgcgcatcggccccaacgagatccatatcatggcgcggagcgaggggtgatgtgccatgaagatttatgataaaaagctggcctatccgtactttgtatggatggtgctgtttaccgttgtgcccttgttcattgtggtgtactacgccatgactgatgccgagggcaattttaccctgaataacctcacctccatcagcggctacggctcggtgtttgcccgcagcctgctgctggcgcttattgctaccgttatctgtctggtcatcgccttcccggtggggtatttcctgtcccgcctgcgggtgaacaagcagcacatcatgcttatgctggtcatgctgcccatgtggatgaactttttgctgcgtacctacgcatggatgggtctgctcagcgtcaatggcccggtgaacaccctgctgggctttatcggccttggcccctataccatgctcaacacctccggtgcggtggtgctgggcatggtgtataactatgtgccctacatgatcctgccgctgtacaccagcatgaccaagatcgaccagagccttgtggaggctgcgcaggaccttggcgccaacaccaccaagacccttgtgcgggtgctcatccccatgagcgtgccgggcatcagcaccggcatcaccatggtgttcgtgccggcagtttccacctttgtcatcagccgtatgctgggcggcggctctaatctgctgatcggtgacctgatcgagatgcagttcttgggtaacagctataacctgaacgtcggctctgccatgagcttggtgctgatgatcatcgtgctgctgtgcatgagctttacatccagctttgacgaggatgaaatggagggcgtgtcctgatgaaaacaaaacatctgcgcctgatgcagcgggtctacatcatcctgttcttctgcttcatgtatctgcccattgcctacatgatcgtgttcagcttcaaccagagcaagggctattcgctgtttacaggctttacctttaaatggtaccgcagcctgttcacgaatgcgtccatcctccacgcgctgtgggtgtccgttgaagtggccatcctgtctgccatcatcgccacggtgctgggcacggcagccagccttggcattgcctccatgagccgcaaaagccgtctgctggtgaccaacatcacctatatcccggtggtcaacccggagatcatcaccggcatctccctgatgctgctgttcgtggcctaccagcgctttgccgcgcagtccgcatggctgccggacaacattatgggcctgcccacgctgctcattgcgcatatcgcgttcaacgtgccttacgttatctttaacgtaagccccaaactcaagcagctggatatcaggctgtacgaggcagcgctggatctgggctgcgacccccggcaggccttcttcaaggtcatcctgccggagatcagccccgccatcctttctgccttcctcatctgcctgacctattccatcgacgatttcatgatctcttacttcaactgcggcaccgtggagaccctgcccattgcaatctactccatgacccgcaaaaaggtcagcccagagatctacgcactgtccaccatcatgttcgtggtcatcctcagcgtcattctggtgtccaatgccatggagagccgcagctaccgccgggatcagaaaacgctgcgaaaggagggcgcacgatgaaacgcattgctgcattgctgctgacgctggctgtggcgctgtgcgccgcattgccggtgcttgccgccggtaccatcgaggtgaccgaggacgtctcggtgtcagacgattacgactggacccgcttcaaagggcagaacgtcaccctgaatgtctacaactggggcgagtacatctccaacggctcggatgacagcgtggacgtggtggccgcctttgaaaagctgaccggcatcaaggtgaactacaccaccttcgactccaacgagtccctgtacgccaaactcaagtccggcgcagccaactacgatgtgatcatcccctccgactacatggtggcaaagatgatcaacgaggggatgcttgcaccccttgactacgagaatatccccaatttccagaagatcgatgcaggctatcgcaacccggattacgacccacagaacgcctacaccgtaccctatatgctgtgcaccaccggcatcatctacaacaccactatggtagacgaagcccctacctgctgggcagacctgtgggatgagcagtatgcgggcaacattctgatgttcaacaacagccgcgatgcctacgccatcgccgcgttcaagagcggccacagtatcaaccccgccgccccggaagaggtggacgaggtggtagaggagcttaagacgcagaagccgctggtgcaggcctacgtcatggacgagatctttgataagatgatcggcggcgaggctgccatcggtgtgtactactccggcgatgccattaccatgatcgacgataacccggatcttgcctgggtgttcccgcaggagggcagcgtgctttcggtggactgcatggctgtgcctgctgccagcgagcacaaagaggccgccgagatgttcatcaacttcatgtgcgagaccgatatcggcaaggccaacagcgagtatatcggctacaccacccccatgcacgatgtttgggaggtgctggacgaggatctgaagaccagcgagatcgcctatccgtctgaggaggacgccgcccgcgaaaaggtgttcaccgccctgagcgatgaggtaaacagtgagctggatctgaagtggagcgagatgaagagttacgacgagggcggcggcagctacctgtttttgctgttgctgctggccatgctggcgctggcctgcttcaatatctggcgcaaagtgcgcagaaagacccgcaatcagtattgatcgtttcaaccaaggctgccgtcccggacgtggtgcggcggcctttttccgataggagggaaagaatatggaacagttttattatcaaggtactgccgtggtagaaaatgccgacgcagactgccacagcctgctcaaggccagcgccctgctgcgctatgtggagcagatttcttccatgcacgcccggaagtttggcatggacgataagttttttgaggatcacggcgtagcgtttctggtgggcaagcaggcgctgcggtttaaccgtgtgcctcgccgtggcgagactttgaccctttgctcccgctcagaaaaggctctccgcggctccatcaagcgcatcaccacccttacggacgaagccgggcaggaagtagccatggtggacagccgctggatcatgtccagtcttgaggatgggcacatcctgcgccagccgggctggacggtagagggatactggaacgagacggtggaagagggactgccccttttgctgcataagcgccgggacagcctgaccagcgccggtctggttacagcgcgctactcccagtgcgatctgcactaccacatcaacaacgctttttatctggatatcgtctgtgacgcgctgccgcaggagatcatgcgcgatcatgttgtgaagttcgcttccatcaattaccaccgcgaagtccccatggggcagcaggtggaggtgttctacaccccctcggatggtggctggtactttattgccaagcacgcagacaaaacggctttcgagtgctatctggagctggagccggtcaagcagtaagagcccggaggaaaaatgcctatgtccaagaccaaggaacttttttgcaccttttttaagatcggtgcctttacctttggcggcggctacgctatggtggcgttgctggagcacgaatttgtagaggaaaagcgctggctcacccgggaggagtttctggatatggtcgctattgccgagtccactcccggccctgtggcggtgaacagcgccacctacatcggctataagctggccggtgttgccggtgcggcagcttctaccttggcggtgtgtctgccgtcctttgcagtcatttaccttatttcgctcttcttcgaccgctttttgcagctgacggtggtggccaatgcctttaagggcattcaggcctgtgtcatctacctgatcttatccgcaggagtcaagatgctcaaaaacttgcagtgcacccccttcaacacggcagtggtggcggtggttctggcggccatggtgggctgctctgtgctggcggtaaaattttcctccatctgttgcatcctgttttgcggcgcagccggggtgctggcctacgcagtggggcaggggaagaaaggcggcacaaaatgatcttgctggagctgttctggaacttccttgtcatcggcgcggtgtcctttggcggcggctacggtatgatctcgctggtgcgggaaacagtgctggggcacggctggctgaccgagagcgaatttctcagctttatcgcagtgtcagagtccacgcccggcccgctggcggtgaacatggctacctttgtcggcgcttcacaagcagggctggcaggctcccttgcggcaacggtgggggtggtgctgccctcttttgtcatcattctgctcatcgcggcggcgctgcacagcctgatgaagtatgccggggtcaacgcctttttggccggggtgcgcccctgcgtggtggctatgatcttagccaccgcctgcaccatggggctttccacgctgggaggctttaccactgtttccggcggctttgccccggatgtgcgtgcactggcggtgtttgccctgctgggcattttacattttgcctataaaaagaaaacgcagaaagcgccgtcccccattgggatgatcttactttctgcggtgctgggcgcagtactgtggagcatctgacccggcaagaaaggatactgcaatgaacattaccgtgtatctgggcgcaagccttggcaacgaccctgcactgccacaggctgtgcagcagctggggcgctggatcggcgaaagcggcaacgcgctggtgtacggcggcagcaaaagcggcctgatggggcttttggccgacagtgtactggccgcaggcggccgggtgaccggcgtagaacccaagtgctttctggacgctgagctgcagcacgagggactgaccgagttgatcgtcaccgaggacatccccgcccgcaagaccaaaatgatcgagctgggggatgcttttatcgcgtttcccggcggcaccggcacgctggaggagatcaccgaggtcatcagcaagctgtctctggggcagctggacgcgccctgcatcctctacgacctgaacggctactaccagcctctgcaccagcttttgcagcagatgatcaccatggggctttctactccggcgcggcagcggaatatcgcctttgccgccgaccttgctcagatccgcgcgattcttgaaaaatgatactgagaagcttacttctcaaacgtaaggagactgctgtacatggctttgtgcggcggtcttttttcataaaatgggataccggggcgtccgcagacgacccggtatcccgaaaaaaatcattccgctggttatgcccatagcgcacgcggagggcatttaaaatctttctgcgcaaccaaaaaggccgctgcacaaaataatgtgcaacggccttctgctattttgttatgtacgctgtgcgcgttaaacttaggcggcagtggtggaagcagcctcagaagaagcagcctcggaggaagcagcctcagaagaagcagcctcggaggaagcagcctcagaggaagcagcctcggaagaagcagcctcagaggaagcggcctcgctggaagcagcctcagaagaagcagcctcggaaacagcggtgcttgcggaagcagcctcagaggtggaggaagcagcagcgctagaagcagaaccaccgcaagcggtcatgccagcagccagagccagagcaacaacagcgatgcaaatattcttgagtttcatatcaatgatctccttagtcttcttgtaaatgtttagcagcgggctttcggtaacacctcactgcgatgctatattctaatccgtttttgaaaaaaatcaagaggattttggtcgaaagttataatccatgtaaagaatctacatagttgtcataaagtttcgccaaaagtaaaagactttttggcaaaaataaagcacgggatagagcctgtaccgccgggcgggaagtacaaaaacagaaaaacttgaaaaatactcataaaatcctttttattgtactgtaaatgtggataatagagacacaacgagggacggacatcccccggaaggctgaacgagaaaaatatttgtggaggatactacaatgaaagactttgattttggctactttggcaccggcgacgagggctatgcccagtacatgaccgcattcgagcgcaatttcagcacggacagcaccgatagctttgcatccgatgacgcagactgcgatgcagacagctgcgacagcactgaggacgatttctgagcctgcactcttttgcccgtttgtgcatacaaagggcaaagggggaatgcggcttgaaccggatcgttttcacactttgtgtctggctgttcccggcggcgtgtaccgcgctgggagcagcaggggtgtttttgctgcgcaggcaggcaagaccggctacccggcgcattttgtgcggaatggcggcgggtatcatgctggcggccagcgtatggagcctgctgctgccggccatagcccggtcgcagggcagggcggcatgggtacccccggcgctggggcttattttaggtgctgtggggcttttgcgactggaggatgccgccgggcagctgctggcgggcggccccgggcattgcgggcgcatggtgctggcggtcaccctgcacaacctgccggagggcatggtggtggggctggctgcggcactggcgctgcacggggacgcagacgccgtaagcggagcgctggcgctgagcctcggaatcggcttgcagaatatcccggagggtgcggcggtcagtctgccgctgacccagagcgggcgcacccgggggcagtcctttgccgcaggggcggcgtccgggctggtggagcctttgggtgcggtgttggcctttgtgctggccgagtgggtaggtgcagcgctgccgtggctcatgagtgcggcggcgggctgtatggtgtgtgtgaccgcacaggagatgatccctgaggcggtggaaccggatgaagtggccggtgtcatcagcatcgtgctggggtttgcgctgatgatggcactggatgtggccctgtgatatagtaaaagcagcgccggacagaccaaaaaagtctgtccggcgctgcttttatgcaaaaaggatttatatcgtctgcggctgcttctggcgcagcttacgccgcaccacaagcaggcaggccagatgcaccagtgcggtcagcgcccagctgatggggtagctgatgtacagcataaaaggggtgcggttcagctggaaaatggtggcaatccacaccagccgcagcacgcacacacccacaaagcttaccaccatgggcagcacgctgtagcccagcccgcgcaggctgctggccagcacgtccatgatgccgcacagcagatagaagccgcagatcaggcgcagccgctcggcgccggtggcgatgaccgcagtgtccgaggagtagaagcgcagcagctggtgccccgccagcgctgcgccgccaccaagcacaaggccggtcaccacgacacacagcagacagttgcggatcacccggtcaagattgtggtacttgcgcgcgccgatattctggctggtaaaggtaacagcggcctgtgcaaaggcgttcatggcggtgtacacaaagccctccagattggaggaagcagagttgcccgccaccaccatggagccgaaggagttgatggaagactggatgaccacattggaaaggctgaacaccgtgctttgcagcccggcaggcaggccgatgagcaaaatctgcttcagcgttccggcgtggaaggccagccgccgcaggtccagccgcagcgcgcccttctcccggacaagcatcccggtcaccagcagcgcagacacggtctggctgatgatggtggccagtgccacgcccgccacgctcatggaaaagccgatgacaaagaccagattcagcaccacgttgatgataccggcagcggccagacagtacagcgggcgcttggtgtcgcccacggcccgcagcagcgcactgctgaagttgtacagcatggtcatgggcatgccgataaaataaatcttcaggtacagggcagaaaggccgatcacatcctccgggcagctcatcagctccagcaggccgcgcgcggcgcaaaagcccaccactgccagcaatacgccgctgactaaacccagcgctacggcagtgtgtaccgtgtcctgcacgcctttttcgtcccgggcgccaaagcaccgggctgccaccacgttggcacccagcgaaagcccgacgaacaggttgaccagcaggttgatcagagagccgttggagcccacggcggccagcgctgtgctgcccgcaaagcgccccaccaccacaacatcggcggcgttgaacagcaattgcagaatgctggatgccgccagcggtacggaaaataagatgatcttttgcagcataggcccgctggtcaggtctgcggaacggctggtcgtagccatgagttatctacctcctataataagccttgtgtaaacatagcaattgtctattataacgcgatattaggtaaaaaacaagaggtgaagtgccctttttctccaaaagcggcaaatatctgccgccgggcgcagcctgcaattgaaaaatgctgcccatactgctataataaggcggtagacccgtagaaaacggaggaagttggatttatgtatcggaatcggatcaaacggctgctggatattttgctgtcggcctgcggcattctgtgcctttcgtggctgctgttgcttttggctattgccatcaagctggactcgcccgggccggtgtttttccggcagaagcgtgtgggcattggcaagcggcatttccagatcctcaagttccgcactatgcgcattgataccccgcacgatatgcctacccatctgctgcacgacccggagcagtatatcacccgcatggggcactttctgcgcaagaccagtctggacgagctgccccagctgtggaatatccttgtgggggatatggcggtcatcggcccgcgcccggcgctttggaaccagtatgacctgctggccgaacgggataagtacggcgcaaacgatgtgcgcccggggctgaccggctgggcgcagatccatggccgggacgagctggaaatcgccgagaaggcaaagctggatggctggtatgtggagcatatcagctttgggctggatgtgaaatgcttctttggcactattaccgccgtgctcaagcatgatggcgtggtggaaggcggcaccggcaccctgcatgatgaaaaatgatctattatatggagacaccggagccttggctgacgctccggtgtctccatttttacagaaagcacagcacagagcggctgaaattggcatatctcttgatttatcccctgaaaagcgtataataaaacagtacacaagacgttaaaggaggattcctgtattatggaacgcacctatatcaatgaggctcaaaaggccatcggcggcacggtgaaggtgcagggctttatcgagaacctgcgcaacagcaagtatatggcatttatcgtgctgaaggatattaccggcaagctgcagatcacggtggaaaaggccgaccaccccgagctggtggataccatcgaccagctcaccccggactctgtcatcaccgtcaccggtaaggtgatggaaaacgactacgtcaagatgggcggcgtggagatgatccccgagagcatcgaggtggagagcaccgccaatgcactgcccatcgtccgcaaggagatcgcagccaccaagaaaaagaaggctgtggagcgctccagcatcgaccagcgcatcgactaccgctggatcgacctgcgcaccgacgagaaccagctgatgttcaaggcacagagctgcttcgtcaatgccatgcgcaagttcttgctggaccgcaacttcatcgagatccacacccccaagctgatcgctgctgccagcgagagcggctctgaggtgttcaaggtggactacttcgaccgcaatgcctatctggcacagagcccccagttctataagcagatggccatggctgccggctttgagcgtatcttcgagaccggtcccgtgttccgcgctgagaagagctacaccaacaagcacgctaccgagttctccggcttcgatctggagttcagctacatcacctccttcaaagacgtgatgaagatggaagaggaactgctgaccgccggtctgcaggccgttaaggacagctacggcgaccagatcaaggagttgttcggactggaagtcatcgtgcccaccaccccgttcccggtggtcaagctggcagacctgtataaggctctggaggaagagttcggctacaccgtggacgagagcgagaagggtgatctgaccaccgaggccgagcgcctgagctacgactgggtcaagaagcactacggccacgagttcctgttcatcaccgattactctgccgagaagcgcgctttctaccatatgcgcgacgagaacggcgtgccgcagggctacgacctgatctggcgcggcgtggagatcaccaccggtgcccagcgcgagcaccgctacgaggtgctgaagaagcaggccgaggaaaagggtctggccgaggacgtcaagttctatctggagttcttccagtacggctgcccgccccacggcggctttggtctgggcatcgaccgcctgaccatgctgctgtgcggcctgagcatcaaggacgccgagttcctgttccgcggccccaaccgcctgaccccgtgatttcataaaacctttctgagagctgctgtgtgtttgcacggcagctcttttttgagtcccgtgaaaaggcaattgaggaaaatccgcagattttcttcaattgcaattatataaaataatttttccgctgattatgcccagagcaaagcggagggcatttaagatcgtcccggcataataagcgctcccttttcatacgatacaacgagcacacccacccctacgggcgcggtgcgcagcgcaacaggaaggggagaaggaccttggagaaacaggaacagaacagcatctgtcgcgagatcggcgcacgcaccggcggggatatctacatcggtgtggtggggccggtgcgcagcggcaaatccacctttatcaagcggttcatggagcagctggtgctgcccgccatgtccggctctgccgctgcccgggagcgtgcccgggacgagctgccgcagtcggcagcggggcgcaccatcatgaccaccgagccgaaattcatcccggagaccgccgtgcccctgcagctggaaggcggcggggcgtgccgggtgcggctgatcgactgcgtgggctacatggtggagggtgccatggggcacgaggaggacgcaaagccccgcatggtcaaaagcccgtggttcgagcaggaggtgccctttgatcttgccgcagagaccggcacccgcaaggtgatctgtgagcactccaccatcggggtggtggtcactacggacggttcggtcagcgatatcccccgggcgggctacgcagaggccgaaaggcgggtcgtcaccgagttagaagcgctgggcaagccctatatcatcctgctcaacagcacccacccggacgcgccggagacccggcagctggccgagggcatggcgcgggactaccgccgcaccgtgctgccggtaagctgtgtggacttggatgcctccatgctgggggagattttgcggcgggtactgtacgagtttccggtgcaggagctggattttgccctgccccgctgggtgaccatgctggagcccgggcactggttgcaagcacaggtgtacacagctgccatgcagctggcagagcgggtgtcccgcatgaaggatctgcccgccggaacggacgcccctgcgctggaatgcgatgccgtgcagcgctcggcagtggcgggcgcagatcttgccgccggcagtgtgcgggtgagcttggagttaaagccggagatcttttatcaggtgctcagcgagcagaccgggctggacatcggggacgaggcggggctgatgccctgcatcatggagcttgcccgggcaaaacgcgcctacgagaaggtgcgcagcgccttggagcaggtggaagccaccggctacggcattgtgatgccctccatcgacgagctgcatctggaaccgccggagatcgtgcatcaggacgggcgctgcggggtgcggctgcaagcctgcgcgccctctatccagatgatgaaggccaccatccacacggaactgagccccatcgtgggcaccgagaagcagagcgaggacttggtgcagagcctgctggccgactttgcggacgacccggtgcagctgtgggagtccaacattttcggcaaaagtctgcacgagctggtgaacgacggcttgcagaacaagctgctccacatcccgcaggaagcccgcacccgcctgcaggaaacgctggagcgggtcatcaacgagggctgcactggactgatctgtatcctgatctaggcgtatctgaaaaaatccccgcccgccgtaagttctgcttacagcgggcggggatcgttctgtcttatttttcttcctcggtcagcttgttgatcagcagctgatagatctcgttgcccttcaggatgaactgcttcttcaccagttcggcgctcagccggtcgggcgcacccagttccagacagaacagttcgctgtccagcccctttacggtgcagcgcacggtgcagtgaccatcggccttttcggtgatgcgggcgctgtacttggcctccttgcgggcccatgtctggcagcgcagcacggcagccaccgcccgctcccgcacgctgcggggcaggtcgtaggccagctcctgcgctaccttgcggcctttgtcggtaatggtgtagctgtcgccggtcagggtgaccagcgcctgttttgtgatatcgtccagacaggagccgatctcaaaatagttgacaagggcttcctccatcagggcgttctcaatctcctgccgggtaatgggaccggcgtttttcaccagatagcacagcagcaaccggatctcggtgctgctggtcaggccgccgggacggacaccggcggtaaaagcatcattggcgctcatcgttccttacatcccccttgcgctttcacatggtatcaaaggtctgcgccgctgccaaaagggcgggcagcgggcagacaaaaactctttctattagtataaaggctttcagcccggattgcaagccgcaacggcaaaatctgtctcaatgcgcttggggcattccggtgtggagtacacccacctgtccagatgtccctcggtgatgaagtaccgcagctcaaaccggtggggctggctcagggcgtggttcacgatgaccagcttgatcttcatcttttccggcaggatgtttttgatgtagacacttaccgcctgcccgggcgcaagaccggagcagctctccgcaagccccgcaaggttcggcgcaatctccacaaaggtaccgtattcctccacgctgcgcacgatgcccaccaccgtttcgcccacggtgaaccgggcggcgttctctgcccatgtgcccagcagctcccggatggtcagcacaaagcgcccttgcgcgtcccggttcttgatggcgcacaagatctgctgtcctacgctgacccggtcggcaggggaggagatgcggcttaccgacatacagtcgatgggcagcagggcactgataccacagcccacgtcacaaaacgcgccgaacggctcgatgtgggtcacggtacagggcaggatatccccgggcgaaagggtgtccagatactccgccttgcacagccgctgcgcctcggcgcgggaaagccggtagcagggcgcgccgtcctcgtccgtgtccagcccctcgatgacaaaacaggtggggcgtcccacccgggtcagcaccgcaatatcccgcacggtaccggtttcggcaccgtccgcgcactgggcaaagggcatcactgcctttacgccgcccagctcaaaccgcagctgccgccgggtgtcaaaggcaagggcagtggcctgtaaaatctcgccgctggccatggcagcccgcagctcggcaggggacagacgggcggcagaacggtaattgttttcggtacgataagcttgcatcatgtttcattcctctttctatatggttttcgggtctctgtgcgatgctacaacgatatgcagcagtgtgcgcagatatttgcattttgtgcggctttgcattatactatatctgtatgcgcagcacccgctcagcgggcggcggcacacactggctctgccgggcatctgcgcggcagaaaagaagggagaggtcggataaatatggacatcgctgtgggagataccatcctcacccgcaaaaagcacccctgcggggcatccagcttcgaggtgctgcgggtgggcatggattttaagatccgctgcaccggctgcggacgcgaggtcatgctgccccgcgccaaaattgaaaagaacatcaaaaaggtggtaaagcccggcagcgcacagtagcgcagccaacgcacccgaaccggaacgaatttgtaaggagaactgcaaggatgcaagatatttcttcccggatggatgcggtctgccgccgctttgaggagctttccatgcggctgaaccagcctgatgccgccgccgacccggcactgttccgcaagttaatgcgggagtaccacgacaccgagccggtggtggaggcttaccgggactggcagaccgcgctggatcatctggcacaggccaaagccctgctggaggagcccggttcactggacccggacttcaagcagatgatacagcaggaaatcagcgaaaaaagtcaagatgtggcaaagctggaaaataatctcaaaattttgctgctgcccaaggacgtgaacgacggcaaaaacgtcatcatggagatccgcagcggtgccggcggcgaggaagccgctctgtttgcccacagtctgctgcggatgtacaccatgtacgcccagaaccgtggctggacgctggaactgctcaacctgaacgagaccgaacttggcggcgtaaaggaagccatcatctcagtggatggcgcaggtgcgtataaccgtctcaagtacgagagcggggtgcaccgggtgcagcgtgtgccggagaccgagacccaaggccgcatccacacctccaccgccactgtggcggtaatgccgcaggcagaggaggtggactttgcgctggacatgaaagacttgcgcattgataccttccgctcctccggtgcgggcggtcagcacatcaacaagacctccagtgccatccgtgtgacccatatccccacaggtacggtggtggagtgccagaacgagcgcagccagttccagaacaaggataaggcgctggagatcctgcgcagccgtctgcttgcgcaaaaacagaaggaacagcaggatgccatcaacgcccagcgtcaggggcaggtgggcaccggcgaccgcagcgagaagatccgcacctacaacttcccgcaggatcgctgcaccgaccatcgcatcgggctgaccgtccacaatctggaaaagatcatggacggcaatctggatgaagtgatcgatgctcttgccacccatgagcagaccgaaaagctgcaaaggctgggcgggtaaaacccggttttgcgggtgcaaaaccatccaaacgattgccaagcaaatatactttacagatagaaagaacgatgattcgtatggaaatcaaaaccagagttttgcctgccgatgaagcaggcgtagccgaggccgcgcagctgctgcggcagggtcagcttgtggccctgcccaccgagacggtctacggcattgccgccgatgcccgcaacggcgcggcggtgcgcgatatctttgtggccaaggggcgcccgcaggataacccccttatcgtccacgtcactgggccggagatgctgccgggtcttgttagcgaggtgccggagcgcgcccagctgctgatggcagccttctgccccggtccgctgaccatcatcatgccgcgcgggccggaggtggcagatgagtgctgcgccggactggataccgtgggcatccggatgcccagccacccggtagcgcgggcggtcatccagcagagcggctgcgcctttgccgcccccagcgccaacctttccggcaagcccagccccaccaacgcacaggatgtgttcaccgatatggacggccgcctgccgttgattttggacggcggcgagtgcgatgtgggtgtggagagcaccgtggtgtcggtggtgggtgataaacccaccctgttccgtcccggccacatcacgctggaggacttggaacgcgccctcggcgaagaggtggaggtgtccaaggccattctggaaaagctgccggagggtgccgtggtgcgcagcccgggcatgaagtacaaacactatgcccccaaggccgatgtgaccctgctcaacggcacctttgcgcagttcaaggcctatgtggacgcccataaagacgagaaccccagctgcctgtgctttaccggcgaaagcgcaaagctggatgtaccctgcgtggaatacggccgcgagggggacggtgccgatcaggcaaagcacatcttccgctccctgcgggcgctggatgagcagggcgacggcgtagtctacgcccgctgcccgcagaaggacggcctgtccatggcagtgtacaaccgcctgatccgcgccgccgccttccgggtgatcgatctatgataactttaggcatcacggggcgcagcggctgcggcaagtccacggtcacggcggtatttgccgcccacggcgtgccgctggcggacgccgaccagctcagccgggaaattttgctgcccggttcgccgctgctgccgcagctggcggcgcggttcggcggggagatcctccgcccggatggcacgctggaccgccgtctgctggctgaccgcgcctttgccaccccggaaggcaaggctgcactggacagcctgacccaccccgccatcgtggcgcgcatccgggcggcaaagcaggcggcgcagaccgccggagcgtccctttttgtgctggacggtgcggtcatcgtgggcacggcggcacaggctgaatgtgaccgcctgtgcgtggtcaccgcaccctttgagaccagcgtggcgcgcattgtggcgcgggacggcatttcgccggagatggctgcccgccgcctgaacgcccagactccggaacggaccctgaccgcacaggcagactacaccctgcacaacgacgccgggttggaggcgctgcaagccgcagccgcccgcctgtgtgagcggctgcaggcagaagggggcgtgacggcagcgctttgaacgaacaaaattatgaaaaagcctacgaccccatcgccgcccgggagcgccgcgcggcgcgggaaaaacagcgacttcgtaaacagcagcgccgccgccggatggtgcggcggctggtcactttgtgcttggcagtggtgcttacggtgtgcgtggtgccgcctttgtgcaaccgggcagagcagcttttgtacccccgcaagtacgagcagctggtggaaaaatgggcagcagcctatgagttggatccgctgctggtctacgcctttatccgcaccgaaagtggcttcgacccgcaggctacctccagcgtggatgcccggggcttgatgcagatgactgaggagacctttctctggatgcgcagcaaaattgccccggaggaaccgctgacctttgccgacctgtacagccccgataccgccatccgctttgggtgctactacctgcacctttgcatggtgcgctacaaaggggatgtatccacggcggcagcggcttaccacagcggctggggcacggtggatcagctgctgcaaatagaggagcactccgcagacggggaaacgctgcagggtttcccctataaccagatgcaccactacgtcaacaagatcaccgcctgctaccagacctatcagcgtctgtacgcaggtcaatgataaaaagttaaggagcgaaaaatcatgagcgaaaaacttactgcaaaagagtacgccgaaaagctgctctacacccccgaatacgctgccgacaagcaggcagacgtaaaggaaaaggctgctgcctttgccgagggctacaagaaatttatggacagcgccaagaccgagcgcgaggctgccgttgtcagcgagcagatgctgctggctgccggctacaaggcttttgagccccaaaaggcctatgcccccggtgagaaggtctacttcattcaggagaacaaggctgttgtggcggctaccatcggccagaagccctatgaagagggcttccgtctggtcatcgcccacatcgactgcccccgtctggacctgcgtcccaaccccctgtacgagtctgaccacatgagctacttccgcacccactactacggcggtatacgcaagtaccagtgggctaccatcccgctggccatccacggcgtgttcacccgcgccgacggctccagcgtcaactttgccatcggtgaggacgagaacgatcccgtgttctgcatcaccgacctgctgccccatctgggtgccgagcagaacgagcgcaagctcagcgagggcatcaagggcgaggagctgaacgtgctcatcggctctgataccgtggaggaagaggacgtcaaggaggctgtcaagctgaacaccctcatcctgctgaaccagaagtacggcatcaccgagcgcgacttcacccgcgctgagatcgaggtggtgcccgctgccaaggcacgcgatgtgggctttgaccgctccatgatcggtgcctacggccacgatgaccgcgtggatgcttaccccgcactgctggccgagatcgagaccaaggaccctgtgcgcaccaccatctgcgtgctgaccgataaggaagagattggctccgacggcgtgaccggtatgcagagcatgtatgtgttccactttatgcagctgctctgccgcgctgccggtcaggacgacatcctcgccttccgcaacagcgtgtgcctgtctgcggacgtgaccgccgcctacgaccccagctgggcaagcgcctttgaaaagcagaacggcacctacgccggccgcggcattgccatcttcaagtacaccggcagccgcggcaagagctctgccagcgacgccaacgccgagctgctgggcgacatcacccggatgctggatgccaacaacgtggcatggcagatcggcgagatgggccgtctggatctgggcggcggtggcaccattgccaagtatgtggcaaaccgcggcatcaaggtgctggatctcggcgtgcccgtgctgtccatgcactctcccttcgaggtcatccataagaccgacctgtacatggcttaccgcgccttctctgtgttctgccagtctgcggactgatcccccgcgctgacggatattttgcattgaaaaaccgagctgcctgcacatttttgtgcggcggctcggttttttgcgcaaaacccttgaccttcaaccggctttaaggtgtaatgtaagggcggaggtgaagcaaatgaacattaaacaggcttccgaacaaagcggcgtgtccgccccgaacatccgcttttatgaaaaagaagggcttctcacaccggcacgcaggcagggcaacgactaccgcgattacaccgccggggatgtccgtacgcttaaacttatccgtatgctgcggatgctggatgtgccgctgcctaccatcaaggcggtactgcgcggggaacagcccctgcaacagacgctgcaagcccagcagaccgtgctggagcagcaggcggcgcagctggcggcagccatgcagttctgcgccgaccttgcccggcaggctccgcagacggacacgctggacgtggacgcctgcctgacccgtatggaaagccccgccccgcagcaggggttcttctccggctggctgcaggattactgcacgctggcgcaggtgcagcaccagaagcactttttctttattccgcagggcagcatcaacaccccgcaggagtttacggcggctttgcaggcctatgcagaggaaaaggggatgcagtttaccctgaccaaagagggaatgtacccggagtttttgctggacggcatcgcgtataaggcctaccgcaacccgggcaagtaccgggacgagatctgttgcgatgctgtgcaccccgagcagctggacgcaggactgccgctccggcgggagaagctgctgcgctttttgcgcctcgctgtgccgccggtatgtacctttgccgccattctggcggcggggtgggtggtgaccggcggcgcaggctggctctggctggcggtgctggcctctgccggggtactgctgggacgctgctttgaaaaatggctgtaaggtgtactaccccagcggcagcgcctcggctacggtcaaaaaggtgtagccgttgtccgcataccaccggatgatatccggtagtgcttcggcggtggtgcgggtggtggcagagtcgtgcatcagcaccacgcaatgggtctgctcgccggtctcccgcaccacgttgcggtagatggtatccgcactggggtgcccgcccacagcgtcctcggcgcagacgttccagtccacccactgccagccgcgctgctctacctcggttttcagctgcggcatcagccccttgccaccgtagcggcggcttacggtgttggtgctgccgccgggaaagcgcaggtaccggatgctctcagcgtccacatagggcgcaatgcgctgtttcagcagggcaatgtccttccagtaggcggcgctgctgcggtagatatcgctgtattcgtgggaggcagagtgcagcgcgatctgatgcccggcggcagcagcctgtgtgagcaggggcagatatttctcattgtagccggtggccaccacaaaaaaggtgccgtgcactccggcggcatccagcgccgccagcacctccggggtagtcttgctggggccgtcgtcaaaggtcaggcagacccatttttccggcagggaaggggcggcgggcgtaccggcatcggatgtagccaccgccggtgcagcaggggaaaagggcgaaaagtccggcgcggcggtcagctcgttcagcttgcagcccaccggcgcgcgtgccggcaccagccaccccgccgcaaacgctgccaacgcagccgccagcagcccgccccatagcccgatgcgcccgccggcgcgctgcacaaattgcttcatatacaaacccctcctttgctctgggcgcagtgccgcaggcacactttccgcgtacaaatgacctgtgcaattgcccgcaaggctgcttttgcgcgcgctgcgctgctattatagatatgaagcataaaaaaacttatgagaaacaaagaaaccacttgacgaatggccggaaatatgttactatatccaagcagtccgcaccaacggttttctacctcaaaaaccggagaactgtataacaggtatgcgagggtggcggaactggcagacgcgcacgtttgaggtgcgtgtggtttatccttgggggttcgagtcccctccctcgcaccagaaggcaagtcggtttttgacttgccttttttctatgagcagaagtggtggaatggcagacacgctggttttaggcaccagttcctagtgagtgagggttcaagtcccttcttctgcataacgtgaaaaaccgcatgaatactggaaaatccggtgttcatgcggttttttgtatttgcggcttgtcaaatactatcgaatactaaccgatatttgcacttacttgctatccgaaagtctgcaaaaagtctgcaagctttacagggcaactctgcgtgaatcgcctttgaaacgacacgaatcgccccatggatgtgttgacaggcttttttgcgaaatggtataatgttattagggatagtgtcggtttatacgggagctgacacgcggcacttgtgcacttttgcggaactttgtgcacagcgctttggcataaagcctttggaagaacgtattgtgaaggggtttggctgcggggcagtcggggggaattgaccttatgaagaacaaacgaaaaaatatactgctcatagcagggatgctgctggcgctgctggtcggcatccttgcttacagtgcctatacccagaagcagatctatcaggaaagcacggcaaacctgctttccacctatgggcagtctgccaagacctttaccatgtttgcgcaacgcaactggaacatcctgaacgactgggacagctacctgggcacccttgcggagctgggagagcaggaggggcagtggcaggagtatatcgcccaaaaggctacctggcaatatacggatttttatctgttcaacgagcagtgcgagttctggaccaccgccgggcggcagggcacagcagagtacatgaaggcgacttttgaaaagctgtataccgaaaacaagccagtgatctccagctatatctccagtcagggcatccgcaagatcctgtttgccatcccaatggagcagccgctgcagttggacggcactacctatacggcgctggtggtcagctacgacaacgccgtgctggaaaagctgctgggcagcatggtctatgagggacagagcgattgctatatcgtgcgctcaaacggcgatgtggtgctttccaccgagacaaagaccgagatcaccgagcaaatgaccaacctgtttgattacttacagcagaacgccagcgtggatcagccttactttgacaccatggtgcagaccctgccgcagggcggcgagggctgcgtgctgtacacgttgaaccggcagaaatattatctgatctatcagccgctggggctcatggattggagcatcatcggtatcgtgcccaccggggtggtggatgccgggatgcgccgggtgcaggtggctaccattctggtcattgcactgctggggcttctgatcatggcaggcgtgataaagatccagcgtgacgcagagcgcaaccgccgccgggagctggagcgccgccgggaaaagagcgatatgatgtttgcgggcatggcacgcgttgtggagcgttttgcagtgtgcgatctggaccgcgaccgctaccagtaccacgagcggcgcggagagccgctgtaccaaccggagggctcttaccagcagatgctggagcaaatatcgcgcaagtatgtagttctgaccgatagcgaaaacgccaagatcccccagatgctggcaccggaaaacctgcgcaggctcatcaaaacggacaacgactccctcaagctggaatatgccgcccgcgataaaagcgcatttttcatgatgacggtcgttcccatggcgtggaaggaaaatcgcctgacccgcgtgatgatgatcgtgcaggatatgggcaagcagcatctgctgcaaagccttgccaacaccgatggcctgaccggtctgctgaacaagcgctattttgaccgggtgctgacagtgctggagcagcacagccagccctttgcgctgttctatatggacttggatcgcttcaagccggtcaacgatacctacggccatgatgtgggtgatgagctgctgaagggcgtttcccagcggcttcagggctgcatccgcagccgggactacgccttccgtctgggcggtgacgagttcgcgctgttgctgcttggttcaatgaagccggaggcctgcgccagcaagatgaatatgatctgtgagatggtcgctgtgccctacgagatcgacggcaataccgtgagcgtgggtgccagctgcggctacgccctgtaccccgccgaaagcgtggacgtgcagcaggtgcgctgcatcgccgaccagcggatgtacgagaataagcaggcaaaccacgccagacaggacggcgcggaaggcatttaaaatcgtcttacataaagcaaggccgcagcacggtattttgtgctgcggccttgccgttatattatgctattacagatgcagcatatcccgctgggcggcagcgcggtagcgcagcgcagcggcgataaagcccttgaacaggggatgtgcgcggttggggcggctcttgaactccgggtggaactgtgcacccagatggaagtcgcggccgggcagctccacagtctccaccagatggccgtccgggctagtgccggagatgaccagcccggcgtcctgcatctcctgccggaagtcgttgttgaactcatagcggtggcggtggcgctcccagatctcgctctcgccgtagcactcggccatcttggtgccgggcgccaccgtgcaggggtacttgcccagacgcatggtgccgcccttggggatattgccctgctggtccggcatcagggagatgacgttgtgggcaccgtccggggtgaattcgctggaattagcgtccttgtagcccagcacattgcgggcaaattcaatgaccatgatttgcataccaaggcagatgccaaagcagggaacacggttctcgcgggcgtactgggctgcctgaatcataccctcaatgccgcggtcgccaaagccgccgggcacgatgatgccgtccacatccgcaaaggcttctttgcaggcggcctgatcggtcagatcctcgctttccacccagcggatttccacctgactgtcattctcaaacccggcatgatacaggctttccatcaccgagagatatgcgtcgtgcagcttgacatacttgcccaccagtgcaatggtgcaggtcttgctgcgggtggcaatgcgggagaccacctgcttccactcggtcaggtcggcagggggaacatccaagtgcagctgctgtaccaccacatcgtccagaccgttggtgtgcagcatcagcgggcactggtagaggctcggcatggtcaggttctcgatgacacactccggcttgacattgcagaaggtgctgatcttgcggcggatatcgctgcccacgctgccgtctgcgcgcagaatgatgatgtcggggcttacgcccatgccctgcagctccttgaccgagtgctgcgcgggcttggatttgtattcgtccgagccggagatgtagggcaccagcaccacatggatgtagcagcagttctcccgtccctgctccagaccaacctgacggatggcctccaggaagggctggctctcgatatcgccggtggtgccgccgatctcggtaatgaccacatccgcctcggtggaggaggccaggttatagatgtagctcttgatctcgttggtgatgtgggggatgatctgcaccgtctgtcccagataagcgccctgacgctccttgttcagcacgttccagtacaccttgccggtggtcaggttggagtacttgttcagattttcgtcaatgaagcgctcgtagtgtcccagatccagatcggtctcggtgccgtcatcggtcacgaacacctcgccgtgctgcagcgggctcatggtgcccgggtccacgttcacataggggtccagcttctggctggccaccttcaggccgcggcacttcaaaagccggcccagagatgcagcggtaatgcccttgcccagaccggagaccacgccgccggtcacaaaaataaattttgccataaaaatataccttcctctttcgtaaaataaaacttttctataaaaggctcgctcccggcgcacccctttccctgcgggtgcggggcgaagccctgtgtctcattcgcttctgtcagcgtactcttccagcacctcctgcgccacctcggcgcggtcgcggcgggtgtccatagcctgtttttcaaggtagcggtgcgcttcggcctcggtcatgtgggcgtgctctaccagacagcactttgcccggctgaccagccgcagctgcccgatcttgtcctgcaggcgggcgttctcctgccgcaaacgctgcaggcggtggttgccggcagccgccatgtgcatggcctgcaaaaacaacggggtggtgaagggtttgctcagcagcagcaccccctgctcgttcaggggggcaagcaattgctcagcctgtgcggcctttaccagaaagaccacaccggcatcagtctgctccacagcggtgatgcacaattcgtgcccgaactcatcgggcaggggagcgttgaccacgatcaactcaaaatcagattccgacattctgcgccgtgcctcggctccgctgggaatgatcaccgggcggctgtaacccatctcggacagccgcgcggcaatatactcgttggagttggcaccggcgcttacgatcagtgcgcgtcccattttccgcactcctttctcctgcgctggcagggatcagatggcgttaaaatagtagacgcgctcgtgctcggcccggtcaggcgcactccgcagtgcggcgcagcgcttgagctcctccgagaaatagcgtttagaaagcccctctggcagcacccggcgcaggaactcgctctcctcggccacctgcaccgcctcctcaagggtggcgggcagggtctcaagccccagtcccttggcttcggcggaatcgaacaggttgcggttcaccggcggctgcaagaccatgcgctgctcaatgccgtccagtccggcagccaaaatcaggccaatggccagatacggattgcaggcggggtccgggctgcgcagctccatgcggcagttgtcgcccttgaccatgggaatgcgcaccagctggctgcggttctggcggctccagctcacatagcggggcgcttcgtcacagccaaagcgctggtagctgttgggcaggggattggtaaacgcggtcagttcccggctgtgtgccagcacaccggccataaagctgccggcaatgctgtccggggcaatatcgccctcaaacaggtttttgccgtccatgtaaagcgagaggttgatgtgcagcccgctaccggcctgctggggcaggggtttgggcagaaagctggcgtgcaggccgttgcgcatggcaatggcacggacgatctgcttaaaggtcatcacgttgtcggcggttttcagcggcccggcgtagcggcagtcgatctcgttctggccgttgccgctttcgtggtggctgtgctggggtgccatacccatctgctccatggtcaggcagatatcccggcgcaggttttcacccgcatccagcggcgcaacgtcaaaatatccgccgaagtcaatgggaatgcaggtagggtggccacggtcgtccttttcaaacagataaaactcgcactcggtacccacgttgcaggtaagccccagctttttgaatttgcggttcacatcccgcaaaaagccccggcagttgccgctaaaggctgcgccgtccggcttttccacatcgcagaagaactgcatcactcggccttcggtgggacgccacggcaggatggtcacggtggaaagatccggccgcagtacaaggtcgctttcctcaacgtgcataaagcctgcaatggagctgccgtcaaagcacacgccctcttccagtgccttggacaggttgctggccagcacggcaatgttcttctgggtgccaaaaatatcacagaaggcaaagcgcacaaatttgacgttgttgtcctccacgaaatccagaatatcctgttgggtggaatagctcataaataacccccttacaaaagctgcatttcaaataaaacgcccaaaggcctgccctcaaaaagggagcaggtctttgggctggtgtaagaaataggaaaaggagaatggctaattgatccggcagccggcggatgcttatttttttacgctgtcaggagattatcagacgtagtaaagcatcttgctgtagctgggcagaggccagtaatcctcgccgcagatagtctcggcatcgtcggcagcggcgcgcagggcatccatcaccgggagaacgttatcgtggaaggcaacggccttctcgctctcggtgggcagtgcctttgcggcattcacggcatcctgcagggtgtcgatggcatcgctcatggtatcggcgtcagaagaaagcttttccaaagtcttggtctcgctgcgcacgctgatgtgctcgctgacagccagcttggaggcggcggtattggcaacctcgctcatgtaggcgttgatggcgggcagcagctgcttgcgggccatctccagcatggtcagagcctcgatgttgatgatcttggagtaatgctccatctcgacctcgtagcggctctccatctccaccttggtcagcacgccgaactcttccatcagctggatgttcttgggctcgaccagtgcgggcagagcagcgggggtattcttcttgttgggcaggccgcgctttgctgcctcggcctcccactcggcggtatagccgttgccgttgaaaataacgcggcggtggtcgcggatggtacgcttgaccagagcgatggctgcactggtaaagtcctcagcgccctccagctcatcggcgtagcccttcagttccttggcgacagcggtgttcaggatggtgttgcagtcgctcaggttctcggcagagccgggcatacggaactcgaacttgttgccggtgaaagcgaagggagaggtacggttgcggtcggtggtgtccttgctgaacttgggcagaacgtccacgcccagatccatcttcatcttgacggggccggcatagggagaatcggatgcaattgcatcgatgacagcttccagctcctcgcctacgaagatagagatgatggccggaggtgcttcgttagcgcccagacggtgatcgttgcccggggtagccacagaggtgcgcagcagatcagcgtactcatccacagccttgataacagcggccaggaagatcaggaactgcaggttctccatgggggtgtcgccgggatccagcaggttctcgtgggtggtgctcatggaccagttgttgtgcttgccgctgccgttcacaccttcaaagggcttctcgtgctgcaggcagaccagaccgtacttgggggcgatcttgcgcatcatctccatggtcagcaggttgtggtcgatggctacgttggtggtgtcgaagatgggagcaagctcgtgctggcagggagcaacctcgttgtgcttggtcttggcaggcacgcccagcttccacagctcctcgtccagttccttcatgaacgcagaaacctcgggacggatgacaccgaagtagtgctcttccagctcctgacccttggcagagggagcaccaaacagggtgcggccggtgaggatcagatcctgacgtgcctcgtagtcctcctttttgacaagaaagtactcctgctcggggccgacggtggtggaaacgtagtccacatccttgccgaacagcttcaggatacggacggcctgaccggacagtgcgttcatggaacgcagcaggggagtctttttatccagagcctcgccggtgtagctgacgaatgcggtggggatgcacagcacgtcatccttcacaaaggcatagctggtggggtcccatgcggtgtagccgcgtgcctcacaggtagcgcgcagaccgccggaggggaaggaggaagcatcgggctcgccgcgtaccagctccttaccggagaactccataatggcggtgccatcgcccacggggctgacgaaaccatcgtgcttctcactggtgatgccggtcaggggctggaaccagtgggtgtaatgggtggcgcccagctccatagcccagcgcttcatcacgctggcaacgacgtttgccacctcaatgtccagcggagcacccttgtgcagggtgttcttcaggctcttgtaggtagcgctgggcaggcgctccttcataacgtgctcattaaagaccttgctgccgtagatctccataacatttgctgccataaatcctactccttacttgatcttacttttttctttcgccttgggtctgccgcaatgcagaaacccaaagcgtgcttacatcttaacaaaaacggcgctgcgagtcaggaggtgacccacagcgccgttgctgtctatggctaagattatagtctttgcgggcaaaaaaggcaattgacaaaactgacgattctgcacaaacacgatctcggatttttggaataaccgcgattggtatgacttttacgccggaaaaacccctttcaggacagctttctctggctaaaaggtgcgcagcatgcggcaattgttcttattgtaaaagcatcagatgacctggaacaggaaaaacttgaggtagttcgtctctggcacgccccacagaatggggtgatccggtgcctgctgctttacctcgatctgccgcagctgccggtgagcgtccttggcggcggcgcgcagcatcttgatgaacaactcctcggtggcaaagtgggagcagctggcagtagccagatacccgccccggggcagcagcttcatggcgcggtaattgatctccttgtagccgcgcatggcattctccaccgtgcggcgcgccttggtaaaggcagggggatccagaatgatgaagtcgtaggggctgccctccttttccagccggggcagcagggcaaaggtatcctcgcagaggaaatccatgttgtcgagaccgttgcgctcggcgttgcgctttgccatggcaatggcttcggcgctgatgtcggcagcagtcacccgggctgccccgcccttggccgcgttcaaggcaaagctgccggtgtgggtaaagcagtccagcacggtatgcccggcggcaaggcgtgccacagtccggcggttatacttctggtcaaggaaaaagccggtcttttgcccgttttcaaagtctacatggtagtacacgccgttttcacagatctcggtctgggtgctttccgggtggctctcgccgggcagggcaaaccagcccttgttctgttccaaaccttccttggcgcgcagggcttcatcattgcgctcgtagatgccgtcaatggtctgaccatccgcccgcagcacctcagccagcagggggaagagcaccggcttcagcctttccatgcctacgctcagggtctgggtgaccagaacattgttgaaccggtccaccgtcaggccggggaactggtctgcctcgccaaaaatgaagcggcaggcagagaggtcggcaggctccagcaccgttttgcggtaggcccatgcgtactccacccggcggcgccagaaggcagtatcaaaggtatcgttggcgttgcgggaaacaagccgcacccggatcttgcttttcagcgagagaaagccggtgccgagataggcgcccttggggctgaccacatccaccagcgtgccgttttccggcgcggtgccgggggcttccagaatgtcgttctcgtacacccaggggtgcccgcccaccaaaagaccctcggcgtgcttgttgactttatatacaggataagtgcgttcgcttttcataaaatgctccttcaactgagaatgcgcaaaatgatgcttgttctgctctttatcataacataaaaatatggtagaataaatacaaaattttgcggaaggaagaaaacgctatggagatcgaacgcaaatggatggtgaccggctggccggaggggctgcctcttgaggaagagttcaccatgcggcagggctatatcagcgtgcagcccacggtgcgcatccgggaggaggcactgaccggcggcagcaccgactatatcctctgcttcaagtccgcagggggcttggcacgggaggagatcgagcgcagcatcgacaaagacctgtttgtgcagctggaagagaaaatcatcggcaagcctttgatcaaaaaggtgcgccggagctaccgcctgccggacggtgcggtgctggaggtgaaccatgtggacgagggcttgcccacagcgttctggtacgccgaggtggagtaccccacagtggaagccgcgctcagctggcagccggaagcctgcggccttgcggcatacctcaacgatgaagtaacgaaccagcccggccagagcatgggcgcatactgggtgcaaaccagagggtaaagccaacaatactgtgaagggaatgactgtttacgaaaaagatcaagctgaaactggaactccagtataactcgccggtgattcttaccttttttctgttgtccatgctggtactgctggcagacggctggacgaacggctggagcaccatgaacctgttctgcgtgtaccgctcctcgtggcgggacccactgggctacatccggctgttcggccatgtgctgggccatgcaaactgggagcattttctcaacaatatgctgctgctgttggtggtgggcccgcccatggaggaaaaatacggcagcatcccgctgctcaagggcattttgtttaccgcgctggtcaccggcgtgctgcaatgtatcctgttccccaacacagggctgctgggtgcgtccggcatcgtgttcatgctcatcatgctgtcctcgctggcgggcttttccggcggcatcccggtcaccatgctgctggtggcggcactgtacttcggccagcaggtgtacgatatcatctttgtgcacgataacgtggcaaactttatgcacatcgtgggcggcttgtgcggtaccgccttcggctattactgcgccctccaccgccgcccggcgcgcagccgcagataaaagagaaaaattatagatgaaaacgggataccggagcgtctgtggacgctccggtatcccgtttatacaagaaagaaaaataatgagtgcgacaaactggaatttgtttactgtttcttatcattgaagtaaatgataaatgctcccatcacggcaacagcaagaataacgccccactctggtgcattgacccaatttgcaaagatggcaccacttatatacccaacaattacggttacgatcattgctaaaatcgctttccccatacaatcacgctcctcgtcaaattccgatttgttgaactaagccgagtataccataccagccaatgaaagtatacccctctaggggagaattggctgaaaaaagcgttcaaagtgcgccgcagagcactttgaacgcgaaccataaaaatattatttccatccccggtcggtggggtccagcatcccggcggcggaatacaccagcgcgttgcagatggcagcggcaacattgctgccgcccttgcgccccatggcaacgatagcgggcacaccgtgggcggtgcacacctcaaacaaccgctccttgctctccactacgttcacaaagcccaccggcaccccgatgaccagcgcagggcgcagcccggcggtttcgatcaggtcggcaatggtcagcagcgccgtgggtgcgttgcccaccgcaaggatggcaccggggtgttcggcggcggctctttgcatggacgccaccgcccgggtggtgccgttggcctttgccagcgcggctacctccgggtcggccatgtagcacagcgctgtgctgctcagccgcgcaaggcccggctttgtaatgccggaaagcgccatgttggtgtcggtaacgatgggtgcagcggcttgcagcgccgccacgcccgccgccaccgcgccgggggtaaagcgcagattgcgggcgtagtcgaaatcggcagtggtatggatgacccgcttgaccacggcggcagtctccggcggcggggttaggcccattgcgtccagttctgcggtgatgatagaaaggctcgtccgctcaatgtcggcgggcagatgatgctgcggggtcatacagtgttcctcccttccagtcccatggcggcgtacagggcgttcatgtccagcgcccggcgcacgccatcggccagcaggtcgaactgctgctgccggtactcggccatggagagcagcggtgcactggcaggggagatgtccttgcggctgcacagcaactgcaccagcttttcggtcagctccccggtatcaaacaggccgtgcagataagtgcccgccacgttgtcctttacgcagccctcggcgctgccgtctgcaaggcggcagaagggcacgccctgcacagcggtgcgcccggtatggatctggtagccggtcagcactgcccccgccagctgcggcgcggtgacggtggcggtatcctgtgtgcggtgcttggcgtccgtaaacacagtctggatgggcagcagccccagcccgcgcacggtctggctgcgtccgctctcggtgccctcggggtcggcaagggtctcgcccagcatctggtagccgccgcacacgcccagcaccggtgtgccggaggttgccagcttctgtaccgcagcttccagcccgcattgccgcagccagagcaggtcgtctatggtgttttttgtgcccggcagaatgaccacgtccggtgcgcccagctgccgggggctttgcacataccgcacgctcagcagcgggtgctgctccagcggcataaaatccgtaaaattggagatatgcggcagccgcagaatggcagcatccagcggcttgacggcggtgttgctttccagccgggaggagagggagtcctcgtcctcgatatctacccgcaggtagggcacaacgcccagcaccggcagatgggtcttttcctccagcatggtaaggccgggtttcaggatggcggcatcgccccggaacttgttgatgaccagccccttgatgcgtgcccgctcggcgggttccagcagctctaccgtgccgtacagctgcgcaaacacgccgccccggtcgatatctcccgccagcagcaccggtgcatccaccagctttgccagccccatgttgacgatatcgtccgcttttaagttgatctctgccgggctgcctgcaccctcgatgacgatgatgtctacctcttcggccagactgtcgtaggcggctaaaatctccgggatcaggctctttttcagtttgaagtaggcggctgcgggcatctgtccgcgcacctcgccgttcacgatgacctgactgcctacatcgctgctgggtttgagcagaatggggttcatgcgcacatccggttccatgccggcggcctgtgcctgtaccacctgcgcacgccccatttccagcccatcccgggtgacaaagctgttcagcgccatgttctggcttttaaagggggctacccggtagccgtcctgtgcaaaaatacggcacagcgcggtgcacagcaggcttttgcccgccccgctcatcgtgccctgcaccatgatacattttgcccggctcatgcaagcacctcctgtaaggtttttaaaagctgttggttttccggcgcggtgcgcacggcggtgcggtaccagctgccgtccagcccggggtagttgccgcagccgcgcagcacgatgccgcgctgccgcagggcatcgcccagtgtttccggtgcttgaaacagcagataattcgcgctgccatccagcacccgcagccccagtgcgcgcaaaccgtcccgcaaaatgggacgctgctgcgcgataagcgcctgcacccgggcaacataagcagtctcgtccagtgccgccagtcccgccgcctgtgcaaggctggaaactgcccacggctgcccggcagactgcatcttatccagtagggcgatgttgctgcacaggcagtagcccagccgcaccccggccatgccgtacagctttgtaaaggccttcaggatgatgaggttcgggcttgccagaagctttttggcacttagcgcttcactttccggcagaaagtccagaaagcactcgtccaccaccagcagcgcaccgcaagcttcgcaccggtgcagcaccgcatccaccagcgctagcggtgtcagctgcccagtggggttattgggctgacagaggaataccatgttggtgtcctcgtccacagcggaaatgaacgcttccgtcactgcaaaatcttcgctctcccgcagaaaatgccgccggacggtgcagcccgccgtttccagcgcggcgccatactccgcaaaggtaggggcaggcagcagggcagtgcggggctttgccgcccacaccagccggaaaatgaggtctgccgcgccgttgccgcacaggatatgcgctgcgggcacggtttcgtgcactgccagctttgcccgcaaagcgcggcagagggggtcggggtagcggtctgcggtggcaagcgcggcggtgatggcctttgccaccccctccggcagtcccagagggctgacattggccgaaaagtccagcgcgtcctgtccgtactgcgcctggtaaccggcccagtcgccgccatgtacaagctgcatcataaaatacctcgtatcaccagcccaagcgccagcgccagcaggctttcggcgtacatcatgcggttcgcgcggcggatatcctccggctcaatgggacgcacggcatcgccgatggtgggcttggggtagtattgaccaaaatagtaggcaggccccgccagctgcacgttcagtgcaccggcgcaggcactttcggtctgggcactgttggggctggcgtggttgcgcctgtcccgccgccagatgtgccacgcactgcgggcatcgttgccggtcagggcagcagcggctacccacagcagggcagcaatgcggctgggcaaaaagttcgcaatgtcgtccagctttgccgccgcacggccaaaatagagatactgcgtgtttttgtagcccaccatgctgtccatggtgttgatggccttgtaggtcagtgccagcggagcgccgcccagcagcatatacaacagcggcgcgatcacgccatcgctggcgttttccgccacggtctccacagcggccttggtcacgccttcggcggtaagcgcctgcgtgtcccgccccacgatgcggcttaccgcaatgcgggcggcgggcaggtcgggctttgtcagctcccggtagacgttcgtactctcttgcacaagcccctttgccgccagtgcctgtccgcaccagaacatctgcactgccagtcccagcagtgggtgcagggcagcggctcccatgcagacaaggcttgtgatcgcaaaggtgcctaccggcagacaaaaggctaagatacgcccgccccaaagctcgccctccggcgttttgggcaggcgggcacgcagtcccttttccagcgcagagatggctttgcccatatacactaccgggtgcggcagccacgccgggtcgccgaaaatcgcatccagcacaaagccgcccagtaccgcgtagccgatcatgcctgcgcctcctttgtgtactgtacggtctttaccagatacagcacccgcttggacgcccaatccttggcatccagcacaaagccgccggcgttgggggcgcaccattcgtaataatccttgtggggcagggcatagcgttccatggcagccatctgggtgccgccgtgggctaagatgaccagcatttcctcgccgcttgcaagggctttgtccaccagtgcagaaaaagccgcgcagatgcggtcacaaaacgcggccttggtctcgccgtccgggcaggggctttcgcagttggcagccacccatgcaaggtagtccgggtcgtgttccatctcaatatagtttctcccctcaaagctgccaaagcacatctccttcagcccgtctgtttctacgagccttgcgcccgggaacagcacctcagcggtctgccgggtgcggcaaagcggggtaatatacacagtcttaggggagatgtctgcccggcacagcatagcgcgcccggcggcagaaagcgggatatcccgctgcccctgatagcgcttttcggcattgtattcggtcaggccgtgacgtaataaatagatcagcattccggcaattctcctttcaaaacggtggggatgccgcagaacatctgcaccacgcacgcagcacgcgccgctagcatacaggccagacgtccggcgttttcccgtgcggcacgctcggccgggtctatgggcaccacaccgccgcccacctcggtggacagcacgatatcataagcggataatttgtccgcaagtttctcaagctcagcattgtccttgcacccggcggcaagctgctgcgcatctgtgatgcagcggccgggcagggtgcgggcaaaggtacgcttgccgctgtaaagcggcccggtgatgaagatcataacagccctccccattggcaggcgcacagcgccgccagcatccacagctcagtcttttgcaaaaaccacccggcaagatcgccggtaatgccgcccagctgctgcacggctacatggtgataccacaaaaacagcaagattgcaactgctgccagtgctccgccgcctaaagccagcagcgccccacaaagcagtatcgccagcactgccagcacattgcgcacagcggtacggtcggcagtggaggcaaaggtatgggcaaggccggtgtttttagccatgggaaaggccgccaccgcaaggccggaaagtgcccgctccagcaccagcgccagcgtccacagcgcgcccacccggggggtgaactgcacacaggcggcgaggcagaggtaagctgcaaaatagctgcacagccggatgaccgcaaaggcaccgcagtgcgggtcctttaaaatttccagcttcttttcccggtcgccgtagctggcaagggcgtcacaggtgtcggcatagccgtccagatggatgccgccggtcacccacaccggcacaaggcagaaccctgccgcccgcgccggggcgggcagcggcagcacaccgcacacgcaccacagtgccccgcataaaagccccaccagcggaaaggcgcacagcgcgtaccgcatattcttttcgttccacgcaaactgcggcaccggcaccgccgaaaacatggcaaaggccaccgcaatggtctgcaaaacgatcatttttccactcctttataatagacagggatgccgcacaccacccgcactacggcgtctgcccgggcggcaagggcgttgttcacccgtgccagcgccagcagatagcggtcggtatccccggcatagtccgcgccgccgctgaatacctcgttggagacaacgatcaagttttcgcactgcgcggcaaggctctccagcccctgcaaaatgtgctcggcggcggcatcgcccgctccggcggggtcgtacagctcgttggcggtcaggttgcccaagtcctccagcagtgcggtacccctgcggggcaaatgcaccgtctctaaatgcagcgggcactcgagggtctcaaactgctttgcagcgcgcattttgcggtgcttttccacccgggcggcgcactcggcatcccacacctgcatggtggccagataataccgcggcaaagcactgcgcagcacgagagcttcggcgtattcgcttttgccgctggcagcgccgcccagtaccagcgtcagcattggggcgtatacggcgcaatgccgccctccgcaaaggaatagcacccctcgtacaccgccagcgccatgtcccacagtgggatactggccactgcgccggtaccctcgcccagatgcagcccggcggtaagcaggggcgttttgcccagcgcgtccagcaccagccgggcggcaggctcggtggagcagtggctggcaaacacggccttggccgctgccgggcacagccgcacggcgcacagcgctgccaccccgctgatgaagccatccatcagcacgggcacacccgccagcgccccgcccaggaacatcccgcacagaccggcgatatcaaagccgcccagcttgctcagtacgtccaatacgtcatcggggtcgggggcattgcaggcaatgccccgccggatggcctccaccttgcgggcaagccctgcatcggaaagccctgcaccgcgcccagtcatggtctgtaccggctgtgccagcagcacggcagcaacagcgctggaggtggtggtgttgccaatgcccatctcaccggtggccacaagcccgtagccctcggcggcaagctgccgggtcagggcgatgccccggccaatggcctccactgcctcggcgcgggtcatggcagggcctttggtaaagtccgcagtcccggcggcaatgcggcagtcccgcacgccgggtacgggcgcaccggcaatgcccaaatccaccggcagcacatcgcagtgcgccgcctgtgccatcctgcatacgctggtgcgccgcgcagcaaggttctcggctacggcgcgggtcacgctctggtcggtctggcttatgccctgcgccaccacgccgttgtctgcacagagcaccgccaccgcccggcgggaaaaatcaaactgcgccgtgccggtcagcgcagcggcatcttccagcagggtctccagtgcgcccagcccacccaagggcttggcaaggctggcccagtgggtatgggcggcggcgcgggcggtttcgtccggcggggtgatagcagcaagcagctgcatcagttcagcttcggtcatttttgtcatcctttgtgtttcaaaaagtgctgcgccgcctgcacaaagcggcggggcagggcagtgccagcccagtaaagatgcgggaaaccggcatacaaatgcgcgcttgcaaagccgcattcccactgcctttttttagctttgcacacagaaaagtctgcgccattctcggaggaatcccagtggtggaattcatggacgggcagcgtttctccagcgtggaaaagcatactgccagcctttgccgtcatgacggcatagccaaagcgcaccagccgcccggtgttgtgcccgctgcccggcagcacacccgccatggggtaaaccttgctgtctgtgccctccagcgtctgccctaagtacagaaagccgccgcactcggcagcggtgggcagcccctcttgccctgcgtcccggatagcagcacgcagggcgatgttctcactcagctgccgggcgtacagctctgggtagcccccgggcaggtacagcccaccgatattttccggcagggcggcgtcccgcagcgggctgaaaaatgcaagctctgcacccgcatcccgcaaggcgtccaacgtttcagcgtaggcaaagcagaaggcttcatcccgcgctacggcaatgcgaacggagggcgtgcacggcgcggcaagcggcggtgcagccggggcagggcggtcagtcaacactgccagctgtgcccagtccagcacaagggcatcggctaattgcaacaacttttgctgcaagtcaacgatctccccggcagttttcaacccgaggtggcggctttcgatgacgcaccccggcagatggggcagataccccaccaccggcagaccggtctcggtttccagcatcgggcgcagcgttttgtacaaggactcagagcaatcattgagcagaatgcccacgatatggctgggcgtgcggaactgcaaaagcccctgcagctcggcagcaagggtgatgcttaccccttttggctgcactaccagcagcaccggcagcgccagcgtatcggccagctcccaagcgcttgcacgggttgtcagcccctgcccgtcgtaaaagcccatggcaccctcgcatacggcagcgccgtgcccggcggcatagcgggcgtaaagcgtgcgcaccgtatccggggcagagaggtagaggtctaaattgtggctttctaccccaagtgcgctgcggtggaacatggggtcgatataatccggcccgcacttgaaggcgcaagggtcagtcccgcgccgctgcaaggcggtcagcacggcacaggtaacggtggtcttgccgctaccggagcgcggtgcggcgatgagaaactgtatcatgtccgtgcccccgtaatgaggaacaccgggttgttagccatcagcaaatgcagactgcccgccgtttttgtgcggctgacggcgatctgtgtcacctccgcagaaaggccgtgggcggtcagggcagctacggcggcactgagcgtttccagcgcaatggcggcaacacacagccgggcaactgaatttttgtgcagcacagcgtctataacagcgtccatattgccctttgtgccgccgataaatacagcatccggggcgggcagcatgtccaaagcttcaggcgctttgccttcgatcagggttagattgtaagcggaaaatttctcccggttttgctggatcagtgcacaggcctccgggtcacactccacggcgtatacctgcccggcaggggcggcaagtgccagctccacgctcacgctaccggtgcccgcgcccacgtcccacagggtatccgtgggggtgaccgccagctttgccagcgcggcggcgcgcacctcctgctttgtcatgggcacagcgccccggataaaagcatcgtccggcaggccgggggtgcggcgggacggcaaagcctcccgttcgatgagcaatacgctcagcggtgcaaagctttgctctgccagttcccgggcaaggccaaagcggatggcttctgcaggggtgccaaggttttcgcccacaagggcgtgagcagcgcccagcccggcggcggtcagtttggcgcaaagggtggcaggggtgtccccgccgccggtgaggaaaaacacctgtggatgcgccaaaacctcggccacagggtcgcaggcgcggccatgcgccgataccagcatccagtcctgccaagggcgccccacagcggcggctaaaagctgtacgctggaaagcccgggcagcacccggacagagtagcccatagcccgcagcaggggcagcagctttgccgcaccggagtaaaacccggtgtcgccgctgtacaaaacagcggtgtccgtatccggctgtgcggcaagacacgcaaggatttcctccggcttatacacggctttgcagttgtcagtgcaccccgccggtaaatgctccaacaggcgctttgccccaaggatgagccctgcgctttgcagcgcagccagtccttgcgcggtcaggctttccgggcagccggagcccattccgatcagagagatcataccagaacctccttacagcgtgccagaatttgtgcggcagtttgtccattttcagccgggcgacgcaccacgatcagttgtgcaccggtgtcctgcgcggcctgtgccttttcggcaaagccgcccacagcaccgccgtccttggtgaccagataccggatggagaattgttcaatcaaggcgcagttcagcgcatagctgaatggcccctgcatggcaatgatgtttctgtgcgggataccggcggcctcgcaggcggcaatgccctcccgcgtgggcagcacccgggggaacagccgctccggcccgagcgccgcaaaagcggcaagctcttttgcgccggtagccagcagcacattgccgctgcacccggccagaaatgcagcggcatgggcggcggtggcaaataccatgctcccggcaggcaagggactttcttcccgcagcagccggtggtactccaccccgaccacggcacacgcagcccggatgtttttggtggcatccaccgcgtaggggtgggtggcgtccacgcacagagcagcgccctgtaaaagagcggccatttcctcgggggtcagccgcccgcagtgcacggtgatgccgtccgctttgccctgttcctctgcacccagcggggtggcaacactgaccagaacctctgctcccagcgccgccagctgccgggagaacacccgcccctcggtagtgccgctaaaaaccactgccttcatctgcggtacccccgtggggtgaccattctgccgcccagctgctttgtggcggcgttgccgatgtacacggtggtaaacatatccaccgcagtgtctttcagctgggcaagggtcaggattcgggcggtctgaccctcccggccgatgttgcgcacgatgccgcagacggtatcggcacttttgccgttttccagcaggatgcacaccgcctttgccagatagtccggcctgcccttggaggagggattgtacaacgcaacgcagaaatctcccatagcggcgcaagccagccgcttctcgatgacctcccacggggtcagccggtcggaaagggaaatgacgcaaaaatcgtgcgccagcggtgcgcccagcactgccccgccgctgagggcagcggtcagtccgggcacgatcttcacggcaacgtccggataatccggggcaagctccagcaggggacttgccatgccgtacaccccggcatcgccggagcagaccagcgccacccgcttgccggtgtgtgccttttccagtgcccagcggcagcggtcgatttcctgcgtcatgccggtggaatagtattcctcgcaggggaattcatcgcggatgaggtcaagatagaccttatatccgcagatggcgtcaacgctttccagcgtattcgcggcctgctgagtcatataaaaaggttcgccggggccaagtcccacgacataaaccaccttctcgggacggtcaatgtcaatttccatcacgtcaagcattctgccacctccagtccggggcaaagggcctgcacgccagcgcaaaggtcacgccgttgcaggcaaatttcgggtaaaacaggctgccgtctgcgtccagcacagccgcccgctcgcagacattgtctaccccggtcacgcgttgtacaaaaggggagggggtgaactgtccgggcacgttgcgcagctgtgcggcagagtaaaacctcgccggccagctgtgcgccagacaaaaggccagcaagcccggctcgttttgcttcaggtcgatgcttgcagcggcggtaactgcctgcgcagcaaggctgtgtcgggtgcagaaggcggcaaaagcagcctccagcgtttcagcgcttgtgccccgcttgcagccgatgcccagcaccccgatgcgcggcacaagatgcagtgcctgcccggtggggcaaagggtgagtgcaaagtcggctttttccggggtatcagcggggaataaccctacgggcacggtgcccgttaccgggaaatcagcccggtaatataccggctgcccggccagtaatttgccgctgaccagcttgatgcgttccggctccagtaccatgcagttttggtgttttgcccactcgtccaccgcaaaaatgccgtgggcatcggtggcggtggtgatcaccggcacggctccgcatacagcggcaatggcccgcgcaagatcattcgcgccgcccagatgcccggacagaatgggcacggcaaaccgcccgcattcatccaccaccaccacggccgggtcagcggtcttgctcttgcagtggggcgcgatggcccgcaccgcaatgcccgcagcgcctacaaatatcagcgcatccgaatgcacaaaccgtgcgcttgtccattctgcaagagaaacaccattctgcccgcaccgggcaacgctgcctggcaaggcggcggccagacgctttgctagcgcaaggccggtatccgtaaaagcaaggtaagcgcgggtcataccggttctcctttgcggaattcggtggtaaaggcggggtcgtacagcttgctgcgctcgtactgcgtgccgagaaaatctcccaccacgataagtgccgtcttggtaatgcccgctgcacgggtgctctcagccaaagaaccaactgtgcaccgcacgattttttcttccggccagctggccttgaacaccacggcggcgggggtgtccggtgtatacgcgccctgcaaaagcgccgcctgcaccttatcgatcagcccgatggacaggaagatcaccatggtcgcgccgtgggcggcaaggcttgccagcttttccttctccggcacgggggtgcgcccctccatgcgggtgatgatgaccgtctggctgaccgtgggtaaagtatactcggcgttcagcgcggcggcagcgccgcaaaagctggaaacaccgggggtatcatcgtaacaaactccgtctgcgtccagcgcgtccatctgctcccggatggcaccgtacaggcaggggtcgccggtgtgtaaccgcacggtggatttgccggcagcttccatccggcgcatcacgtccagtacctgctccagcgtcatttcggcgctgttgtagatagcacagtccggctttgccagccccagcagcgccggattgaccagactgcccgcataaataatgcagtccgcagcctgtaaaaatgctgcaccgcgctgggtgatcagatccggcgcgccggggcctgcgcccacaaaatgtaccatgtgcattactccttccattcgtctaacaggcgggcggcagtctcggtctgtcccagcgggccgtgctgatttgaaaacaacaccgcacccacccggaacgccccgcccgcgcggcggtcaagatgcagctggatggcggcaagcaggctttgcagcaccagctcccgcagcccggctgtatccagaatctccagacaggcatccgtggtggctgcattgtacagcgcagtgcacaccttccggtcagcaccgcacagggcagcgtgggtgcagaacagctccgtgcggcagtctgccgtgtgggagtgggtgttcataatgccgcccgccagcttgcacagcttgccgatgtgtcccaccagcagcacctgttcaaagtgcgccgctgctgccatatccagcgtatctccgataaagttggacgttttgaccaccgggatatcagcaaactgcggatacgtttcgtgcagatagtccagcccgtaattgcccggggcaaggatgagccgccggtggtcgtttgcccgcagcgtcgcctgattcatctccagctggatggtgtccagaatggcctgctggctcatgggttctacaatgccgctggtgcccagtaccgacagcccgccctccaccccgatatgcgggttgaaggtgcgccgggctacctcctcgccgccggggatggagatgatcacggcaaagccgccgggataacaggcggcttccgcctcccggcgcagcgcctcagtgatcatctgccggggcacatggttgatggcggcctgcccgaccggctggtccagcccgggctttgtcaccttgcccactcccgcgccgccggtaatacatacctcgggcgtgccgggcagcagcgtcaccgtggcggtcaccggcagaccggtggtcacgtccacatcgtcgccgccgtccttttcaatggcgcattccgcaccctcggcaacggtgcggcagaacaggggagccacctccaccacgatgcccttcggcgtgcgcagggcgacggtttccggtgctgtgccggtcagcagcagacgagcggccccggcagcggccagcgccgcacaggtgccggtggtgtacccgcagcgcagcagcttttgcccgctgcgcacatagtgctcaaattggggttttaccggctttggcgggtcaaaaacagcgctgtactgtacttccgtcaggccgtagagcgctttgatattttcccgggcaaaggcctgtgccggggacatgggcgcagaaacgccgtgcggcgaaacgcagaccaccgcgtccgcgatcttctgcgccatgtccagctcgtgcagggtcacgatgaccgcaagctgctgctcatgcgccagtttttgcaaaatggtcagtagttcgatcttgcccttgatatccagaaaagaggtgggctcgtccagcaaaagcacctgcggctgctgacagactgcccgcgccagcagaatgcgctgccgctgtccgtcactgacgcagttgaagtcccggtcggccagatgcgctgcgcccaccagctccagcgcgctctgtacctgttttttgtcctcggcagaaaggatgcccagccgcccggtgtaggggatgcgtcctgccgctgcaaactcaaagcaggtggtcaactcggtgcggcgggtgtggggcagcatcagcgccagcttttgcgcccgggcgttgccggggatgcgtgccagctcctgcccgtccagcagtaccgcgccgcccaaaggggccagctgccccgccaatgttttgagcagggtggatttgcccgcgccgttcgggccgatgagtgccagcacctgccccttggcagcgcccagcgcgatatcccgggcaagggcagctttgccgtagccgatggcaagggcgttggtttcaacagagtacttcatcgcacatcctcccggttgcggcgcagcagcagcccaatgaccaccggcgcgccgaatacagcggtgaccgcgctgatggaaagctccatgggtgcaaacaggctgcgggcaattaaatcacacagcaggcagaacgctgccccgcccaagcagcacccgggcaaaacatacagcgggcgggcgctgcccagcagctgcttgacaaggtgcggcacggcgatacccacaaaggagatcggccccgcaaaggcggtaacgcaggcggccagcaggctggaaagcagcaccaaaagccgggaaaaccgccgcacatccacgcccacactgcgggcgtaggcttcgcccatctggtaagctgccatgggctttgcaaggcagaaggccgccgccagcgcaggcagcaccaccagcgccgctgtgcgcacgttgccccacgtcatgccggaaaagctgccctgcgaccagttgtgcaggttgacgatgctgctgtcctgcgcaaaagccaccacaaactcggtgatggcagagcagatgtaaccgatcattacgccgcagattacaaggatgctcatgcgctgcacccggcgggcagcggccagcacaaaagccatggccgccatagcgcccgcaaaggctgccagaatgagcacagcagagcttgtcagcaggccgtagttcaaaaacagcaccatcaccagcgccaccgccagcttagccccgctggaaatgcccatcacaaaggggccggcaatggggtttgcaaaaaaggtctgcaacagatagcccgctgccgagagcgcagcgcccagcaacgcggccatcaccgcgcggggcaggcgcagctgtgtgataatgcctacgctcagcgcgtcctgtccgcgtccggtcagggctgcaagcacggcctgcggggtaagcgcaacgctgccccagaacaggctcacggcaaacagcactgccagcagcagggcaaggcagcaataggaaaaaacaaggcgtttgcggctggtcataagcggctcctcaggtgatcttggtcaaaaaatgcagggtgtcggggtcggcagtttccccggtaaaaacagcgtggaggtccagcataaaatctgccagtgccatgctctgctggaaaaagctgggcgtcgtgcaccagatatctccgctttgcaccgccttgcactctgccagcaacgcgcagcgggcaagcaactcttccttggtggagatggtgccctcgatggtaccgttataaataagcacatcggcatccctgaccccagcgtaaagatcctccagtgggatattcatggtggaaagactgttgccgctgtcggtaagggccgtaaaaacgtattcgccaccggccatgccgatcatctgcgccacatagtctccgcttttgcgcacagtggcaaggccgctggaagtaatggagaaaaacgcgcagcgtttgccggtggagggctgctccagcagcggtgcaatgcgctgcgcctgctgcgcaaaaacctcctcggcaagggcttctttgcccagcaagatgccgtacagcttgatccactccatccgcgccagcgggctgctctcgtagctggagcgctccaccagcaccggaatgccgaaccgctccatctgctccttcacctccggggtgtggtagatcatggtgttttccaccgcaaggccgcattctgcggtcaggatgcgttcgtagtccggggcgctgtacttgcctgcgtaggcgatgcgcccggcctgcatggcctgctttgcctcgtccagataccagccctcggcgcgggtgccggaaagggcaatgctgtccagcgcgtccagatgaaggaacaagtccatggcagaggtggacaccagatagatgttctgcaccggctgctgtaaaacggtcactccctcgggcacggtgtgcagggtggcagcgccctccggccggacaagaaactttgcctgtgcgtccgggatggtcagcagggtagagccgtccgcgtagcagtcggcggtaaactgggtggcatagtccagcgggtaggcgtggtcaaacaccaactcgtccgtatcggcgggtgcggtgggtgcggcggtgcagcctgcaagcaccagcgcggcggcgggcagagcctttaaaaattgagcgcgggtcagcttcatggaagattactccaaggtaaaagtcagggtgtattcgatctcgtggggcttgctcatggcaacagtgtcggcggtaacagtcagcggagtgcccagtgcagctacaggaatttcaaaggtggagttgccctcggtattggtgggcagatacttctcgccgtccacgatcatgtagtcgtagttggggctgctccacacgatggtggcggtcatcttgccctctgccacagtcagggcagcagggctttccacggtggcgcggccggagccgccctccagcactacggcggcggtgtatgcgccgtctgcgggggtctcggaggcctgttcggtcttaggctcggcgttgcgcacgctgacggtgtggtcgtaccacttgcccttggtgccaagcaacgccagctggaagtcggtgtccagtgcttccaccgggatatcgtaaccatacacttcctcggtggtgccgtctgcgtaggtaaccgtgtccacggtggggatgagccatgcggtcttgttggcctcggcatcggcggcaaggccggggtagaggttcacgatctttttggaagcaagactgacgtggaaggtcatcacgccgttttccacggtcagggtgcccttgccgttgcaggcttcattggggtggaacatactgctgtcggtctcgaaatcagcggtatatatgccgtccggcagggcagtctcagcagcggcagaggaaaccaccacggaagaagcagcctcagagcttgcggcagcggaagaagcggggacagccccgccgcagcctgccagagaagcagccagcaccacaccggccagagaaacgatgataaactgtttgcaacgcataaaataaatacctcagtatcccaaatttttgcccggcgtctaagctgccggggcagggggcgttttctcctcgtgcggggaatgcgcccataaaagaagccctctccgtatgcttggcagcgccggagagggcttctgaatccattagccgttcagaagatccatagcggccttggtatgtgcaatgtacagctgctggatgtccgcaatgcggcccagacccgagatctggcagtccacattttcaaagcagcctgcggcggtaaactggctcagccagctgtcggcgtcctcaccggccatgtcgttgttggcgtggtcgcctgccaccaccatcagcgggcgcaggatgaccttggtgtaaccggcagccttcacagcctcgatgacagcctcgcaggaggtgtcctcaggctcgccctccaccgtgccgatgaacacgttgtcgtagcccaaagtctgcatggtggtctgcatctggctgtagctcaccttggcggtgtgagaggtgccgtgacccataaagacgaaagcggtcttatcggcggcggcggcagcggcgctgtcgtaaccggcttccttcacagcggcagcggtaacagccttggcaacagcttccttatctgcattgatgacggaagcatctgcgcccacctcgcccagcaggggctcggccacagcaacgctctcaaacttgtcgcggtactggtccagcatctcgttcatctcgtcgtattctgcaccgtgcatcagatgggtgggctgcacgatcaggttcttcacgccgtttgccacagcgcggtccagcgcctgctgcatgttgtcgatcttctcgccgtcgcgtgcctgcacatggttgatgatgatctgtgcggtaaaggcgcggcgcacgctccagtcggggtaggcggcctgcaaggcgtcctcaatgcccttgatgtcggcagcgcggctgtcgttgaaggaggtgccgaaggacaccaccagcagctcgttttcgccaatgtcatcggcgttgcgggcatcgtccttggaggcatcgccggtgtcgcggccaaagtagtcggggtcggcgttctcgccctccaccagctccttctgggcatcggtcaaagcgtcccaagcggcctttgcggcttcgcactgggcatcggtgtcatcggtgcgctgctgcacatagatggcgtcaatcaggtctgccacgttctgtgcggccagtgcgtcagcgtctgcgctggaagcttcgctgctggcggcagagctggcagcaacagaggaagcagtgctggatgcagccccgccgcagccggtcagtacaccggcgcacagagccagagcggtcagagcggccgccgttttgcggatgttgcgttttttcatcttgttttcctttcctgatgtgggtgaaatacggcaccgaacagaagggtacaggaaagagaatcggcaaaaaacggggtcttttgcttgcgaaatggcaaagcaaaaagaccccgtttcctacaggctttttggtacaaccaattcctcgtgatctggggcggcaaagccccggtaccaacagcgggcaggtttcctgactgaaagctcaacgcccgctgccgccttcccaagccggatggctcagtgaccggtgcaaaagcaccctgacagtggactcccttatcacagtgacgagatcgtgcgggattgacacccgcttcccttttaacgtccctgccgccgcccggtggggcaaagtgacggaacgcacctgctgttttctgttcagttcgtcaaaaagtatagcacagccctatacaaaacgcaagaaaaaacggagaaatgcttgaccttccccctgccggaaggtgtatacttggctcgaaactgaaagcaaggaggcagcccatgttaaagatcgagcatctgaccaaaacctacggcggcaagcccgccgtgcaggacctttgcctgcacatccgcccgggggagttgtgtgcctttatcgggcacaacggcgcgggcaagaccactaccttaaaatgctgctgcggtatccagcaatttgatgccggagaaatttatgtggacggcatttccgtgcgggagaacccgctggaatgcaagcgccgcttggcctatctgccggatgacccgcagctgtacgagtatatgaccggtatccagtaccttgattttattgcggatatctttggcgtaagcgccgcacagcggacgcagcgcatccggcagtacggcgatgcctttggcctgacgcaggatttggcgcagtccatcggggcatactcccacggcatgaagcagaagcttgccattattgcggcgctgctgcacgagccgaagctgattttaatggacgagccctttgtcgggctggatccgctggcttcccatcaactcaagacccagatgaaggccttttgtgcgcaaggcggggcgatctttttctccacccatgtgctggaggtggccgaaaagctttgcgacagggtagctattctgcgtaaaggtcagctggtgcgcgagggtgccatggagcaggtacgtggtgacgacacgctggaagaggtctttctggaactggaggatacgggggaagcgctatgatccgtgcattgctcaaaaaacagcttctggaactgggcgcggcctttgtgcgcagcagcaaaactggcaagcggcgctcccgggcaggagcattcgggtatgcattgctgtttgcggtgctgatgctgctggtcatgctcagctttggctctatggcgctgccgctggcagtgacgctggtgccgcaggggctggactggctctattttgtgctgatggagctttcggcgctgacggtcagtgtgctggcaagcgcctttaccagctacgggcatttgttccgctgccgggataaccagcagctgctggcgctgcccatcccgccgggcgctatttttgcggtgcgctgcggcggggtgtacctgaccgggcttatttatctgctgctggcgtgggtgccctcggtggtctgctatgcgctggcggcaccccgccccggcggagccctgttggcggcgctgccggtagcactggcgctggcgggagtttccatggtgctggccgttctgctgggctgggcggtggcgctgctcaaccgccgcgcccagcataaaagccttgtcactgtggtgggtacgctgctctttctggcggtctactatgcagcgttctgctgggtgagcaacgcagtggaggcccttgcggtggatgccgtacaggcaggcgcaaccgccggtcgtgttgctgcaccgctgcgtctgctgggtctggcggcagtgggcaacgtcccggcgctgctgctgtttctggcgctggctgcggcctgtatggcgctgtgcggtaaggcgctggcaaagccctatctgcggcttttgacccttgaaccgggcagagccaaagcggaataccgcgcaaagacgcaaaaaaagcagcccccgcgccgggcattactgcggcgggaactgttgcatctgggcgcttgccccatgtggctgctcaactgtgcactgagcagcctgctgctgccggtgctgggcgtggcagcactgtggaaggccgcagacctgcgcgcctttactgctgcttacctgccggagagcctgcctatgctggtgtgcgggatggtgtgcgccatagccgccatgaactttatcacagcgccatcggtgtcgctggaagggggcaccctctggctgctgcaaagcctgccggtgcccccgcagcaggtgctgcgggcaaaggcagagctgcaattgctgctcacgctgccgggggcgtggttttgcgccgggtgcgccatggcggcgctgcgcattccggcagggcaggggctgctggtgatggtggtactggcagcctttgtgtggctgacggcgcagtttgggcttgctttgggtttgtgcctgcccaacctccactgggtaagcgaggccgccgtggtcaagcggagcgccgccagtatgctggcgatgttcggcgggtggctgctggcgggcggggtgctgtttttgcccctgatcttgctggactacgctgtgccgccgctggccgcacagactgtttgtctggctgtgctgctggggttggacttgctgctgcaccgctggctgtgcacccgcggcgcagcccggtttgccgccctgcactgaagtgggaaaaactttattagaacaaaatcgggcagcctgcgggctgcccgattttgcattttcacgggaggggtgcaacggaaaacagtaggatgcagtgcctgtttcctgtggaaacaggcactgcgggaagaacgatgttttttgcagttacagcgcatccagtacggtgcgggcggcgcggatatttgcttcgctggtctgccaaatctcaaactccgaaaagcccggcagacccatgggcacgccttcccgccggaaggtcatgcggctgtccagcacctgcttgccggaaaggtggaacgcccgggcaccggtctgggcagcaagggcgggaatgttggcagcggatacgcctgcaccaaccagaatctccacctcctgcccggcagcttccaccagctgccgcagcagggcagcgccctgcggggcgcttgcggcctgtccgctggtcaggatggtggtaagccccagctgctttgcggcttccagtgcggcaaaggggtcacaacagacatcaaaggcgcggtgcagggtgcagtccacggtgcggtgggctttttcagccgcctgccgggctgcggcatagatggggcgcagggcatcggtgtccagcgcgcccgccggggtcagcacgccggtcacgatgccgtcggcaccggcggctaccagctcggcggcgcactcggccatctgtgcaagctcgtaatggtcgtagcagaaatcgccaaagcggggacggataagtgcccgcaccggcaggccggtctcagccttgacctgacgcagcagggcaggggaaggggtggtgccgccgataatcaggtcggcacacagctccagccggtcagcgccgccgcgttttgccgccagtgcgctggcggtgctgtctacgcatacttccaaagtgcagtgcatagcgatacctccatctacaaaaaacgattttgaatggccgccgcgctgctttggccattttcagcggaatgaatactttaatttatcaatgggaaaatctgcggattttcccattgattttttcacaggggggagagcaaaggaaaagtacttttgtttgatgctgtgctctaaaaaaggctgttgcgccatgatatgtgcaacagcctcggggagttatggtttattttacgctttcaaggaagcggacaaaaccggcgcggcctgcttcatccagcttgtacacaccggcatcggccagcacctgtgcgaacacatggcctacctcgtcctgcaagatcaggtgcacattgtcggcgttcagctccgggtgctttgcaaggatttcctcggcccactcggcgtgcttttgcagggcttcggggtactctgcggtgggcagatgcgccaccagcacatcagcaaggtcgaacagctcctgcttcaggcggctgggcagcacggccaaacccatcacttcgatcaggccgatgttctcttttttgatgtggtgcagctttgcatgggggtggtacacgcccagcggatgctccggggtggtgatgttattgcgcagcaccagatccagctgatacttgccgtcccgcatccgggcgatgggggtaatggtgttgtggggctcgccgtcggtctcggcaaagataaagcagctctcgtcggtgtagctgcgccaagcagccagcagcttatcggccagctccacaaggcgtgcatcgtccgcacaggtcagacggatgcagctcatgggccagtgcacgataccggcctccacgtcctcaaagccggggaacacccaaggcttttcaataggagctttggccatggcaaactcgtaatgaccgccctggaaatggtcatgactcaggatgctgccgcccacgataggcaggtcggcgttgctgcccacaaaatagtgggggaacagacccacaaaatccagcagcttgcggaaggttgcccgctcgatcttcatgggggtatgctggttgttgaatacgatgcagtgctcgttgtagtaaacgtaggggctgtactgcaaattccacgcgctgtcgttgatggtcagcgggatgatgcggtgattttcgcgcgcagggtggttcatgcggccggcgtagccctcgttctccacgcacagctggcacttggggtaagcactctggggtgcaagctttgcggcggcaatggccttgggatctttttccggcttggacaggttgatggtgatatccagatcgccgtactcggtcttggtgacccacttcagatcgcgcttgatacggtagcggcggatgtagtcggtgtcctgactgaacttgtagaaccagtcggtggcggcctgcgggccctcgttttcgtaccgctcctcaaagtttgcgcgcacgatgctggggcgcggggtcagcacgcccatcagcttggtgtcgaacagatcgcgtgcggtggagttatcctcgcacacgccgcgggcaacggcatcgtccacaagggtcttgaggatgctttccagatcggtatagcacacctcgccctccggggcggtaaagtcgtccagctgcatggtcatcagcagctgattgcggatatagatctcgtcatcaggcaaaatcagcccggtgtccagcccgtagttcacgagctgctggatggtggtagagatcacagcacagcacctccctcaggacgaatgctcagcacatggcagcggcctgcgccgaggatcttttccatgtttgccttaaagtctgccagcatctccaccggcacaaaggcctgcaccgtaccggcaaaaccgccgccgtgcacgcgcacagcgcccttgccgcccagataatgcttggcagcggcgatggtcacagccacctcctgatgctccttgtaaccggcagggatgacgttctgcaaatactcccagctactgtcgccggaggcagtcaccatctgcaaaaaggcatcaaaatcgccctcgcgcagggcagccacctgctggggcacacggtcgttatcggcgtagaagtggaaggcgcgcagcacagcgcggtcgccgcactgcttgcggcaggccggaatatttgcaaggaaggtttcaaagggcacgtcccgcagcacctcgccgccgcacacagcggccacagcgcggcactcgttggggatggcggcgtactcgtcggtcaggtcggcatggtctgcaccggagtccagaatgcacagcgccaggccggccttggaaaagtccacctgcactggctccacgtcggggtttgccttgtcggcaaagtcgatggtgataatgttgcccacgctggaggccatctgatccatcagaccacagggcttgccaaagtacacattttcagcccactggccgatctgtgcaatggcaatgggggagactttttcatccatgaagcagtcgttcagaatcacgccgaccagcacctcaaatgcggcagaggaagaaacgccgctgcccttgggcacattggaggaaatgtacacgtccagaccggacagctttgcgccacgctgacggaaagcctcgcactcgccgcgcagtagggaagcagtggtgttctcctcctccttgcgggcggtcaggtcatcaaggtcgatgacgcacaggtcgtagccctcgctctgcacgcgcagctggttcaggctgttgggggcggcagcagcgatcatatcaatgttcacgctgcctgccagcacgcggccatgctggtggtcggtgtggttgccgccgatctcggtgcggccaggggcactatacaaaccggcctcggtatgtgcgccgaaggtggtctctaacccgtccagaacagccgcatagcgggctgcctgtgcaggggtctcgtcgggggtgcagcagtacagcgcagccagacgcgcagcgtgtgcgcccttggtcagctcctgcttccaggtggaaatggacttcatcatggaaatttcctcctactattatgatcggaaaagtcgatgcagccgttcgcagctgccgtagctgcttctataatagtcaaacgcaacgcaaaaaaccatgtgttattgttgcatctcgatgaaaagttgcaaaaagcgcctgtgcagctcaatcgactgctgtcgaacaaataaaataaaagtttttcgggcgaatcaaaatgcttggcataaatgcacacaaatcccggaattttgagcgcagcgcccaaaaaagacgggatggaaaattgcactttgcacaaaaaaatacccccgcaccgatgcagccatcgggcgcggggggtgtagttcagcgggtaaattcgctgccagtcagaccatcaaggttcagcattccttccagagcggcaatgtcggcgttcacgtccagcgcgtcggcttggaacagcttgtccagctggttttcaaaggcggtcaccagcaggtccatgctgcgctcgatgctgtgcttggcctcggtaatgttcgtgccctccaccgcctgcccggaaaggcaggcgtaggtgttcagcagcttgagggcggtaggcagataatagttcataaatttttgcagctgtgcttttttgtccgggtccttctgcgccagcgcaaagatgcgcccgctgacctcttccagccgggagatcttctggctcatcaccgggtcggggatggcatcgttcacctcccgcagttggcgcagcagggcggcatactcgtcctctgcagcgggatgagctttaggtgtcggggcttgcgcgggctttttcggctgcggggctgcgccgcgcaccaccagcgtgtcggtgcggttgtcaatataggcatccgcgccgaagtatccgtgctcgatggcgcttttcaccgcagcacgtccccgggcagcgtccaccccggcggcggcaaacagttctggcagggggatattatcgcgctcgcccacaaccttatccagcagctgctccagcttgcgggtgcggttcatccgcagaccggtcagcagcgcaccgccgccgccaatggccatgacgatatcggaaaacagctccccggggtcgggcagaatctgccatgcaccgatgatatccaccgcatccgtcaccccggcaaacaggaaaacggcacccatgatggtgcagaggacggcaatatttttatgccactgctttgcacttttctgctctgccgttgggatatcgtggccgtagacaggctcgctcttccggtcgggctccggcccaaggtcggcgcggtagtcgccccggtcacgggcagcctcctgctcctccttctgcatcttttggtcgatgcccttcaggatgaacagcagcacccccaacggcccggacatcgccatgacgataaagatggcaatggtggggatctttgcaaaataatgttttctcggctccatgaaacagaattcctttcacagaaagataaaaataagaccgcgttccactctattatagcggagcgcggcctttttgttaagggggtatttctgttctcgtgaaaatgcgcttggaacggtccacagaccgtgacaagcgcaaaattaaaacatctcttccacaaagaggccgctacgcaaatgcacagcggcctctccataaaagtttacttcatcaggctgcaaacggcctcggcataagcggcggggtcatccacgggcagaccctcgatcagctgtgcctgtgcgtacagcagggcgctgtacttgttcagcttctcggtgtcgccagcctcctgtgcggccttcagggcggcaaacacggggtggttcacgttcagctccagcaccttgtcgctcttcacgccctcgctgccgggctgcttggacagcaccttctccatctcaatggacagcgggccgtcagcgctcaggcagacggggtgatccttcaggcgagtggagaccttgacctccttcaccttgccgttcaaggcgtccttcatggcatcgaacagagccttgttctcggcagtggcatcctcggcggccttcttctcctcttcggattccagacccagatcaccgctgttcacgttcttgaactccacggtgccgtccttgccctcggcatccttgcgggggtagctgtgcaggatctgcaggcagaactcatccacatcctcggtcagcagcagtacgtcaaagcacttgtccagcacaagctctgcggagggcagctttgccagacggtcggtggaatcgcctgcggcaaagtagatgtacttctgctcagcgggcatcttgtcgatgtactcctgcagggtgaccatcttctgctccttggcggaccagaacagcagcaggtcgcgcagcagttcggcgtgcattccgtagtcagaataagcaccaaacttgatctgacgaccgaactccttccagaactcctcgtacttcgcacggtcgttgtttagcatggcgtgcagctcgttcttgatcttcttttccagtgcgttatggatcagcttcagctggctgtccttctgcagcatctcacggctgatattcaggctcagatcctgactgtccacaatgccctttacaaagctgaagtaatccggcagcaggtcggcacacttttccataatgagcacaccggaagcgtacagcgccagacccttctcgtagtccttggtgtagaagtcgtagggacggtggctgggcacgaacagcagggcattgtagttggcggtaccctcggtgcggctcacgatgacccgggcggggtcagcgtaatcaccgaacttatccttgtagaagctgttgtactcctcatcggtcacttcgctcttctgcttcttccagatggggatcatgctgttcagggtctccagctcggtgtaggtctcccactcgggcttgtagtcctcgggcttggggtccggttccggcttctgacggctcttttcgcgctccatctggatggggtagcgcacatagtcgctgtacttcttcacgatggccacaatgccgtattcatccaggaagttgtcgtatttctcagtgtcggtatccggcttgatgtgcagaatgacctgggtgcccacggtatccttctgggcgggggtcatctcgtagccgtccacaccggaggactcccactgccatgcctcgtccgagccataagccttggagataaccgtcagcttatcggccaccataaaggcggagtagaagcccacgccgaactgaccgatgatatcaatgttctcgtccttgttgtccttcttgaaatccagagaaccggagtgtgcaatggtgcccagattctgctccagctcttccttggtcataccaatgccgttatcctccacggtcaggatgcggttttccttatcgcgggtgatgagaatacggaaatcgcccttgttcatgcccacggaggtgtcggtcaggctcttataatacagcttatcaatggcgtccgaagcattggagatcagttcccgcaggaagatctctttattggtatagatggagttgatcatcatgtccatcagttttttgctctctgcctgaaattctttcttggccataatacaaaacctcttttatcacatatttggtgcaccgtacccggtaaactgccggaatacttagcactcataacttctgagtgctaatatacaacgacttgcagggaaaatcaaggcttttcataaaaagttaaaatttgttctcctgtgcgcgaagcggcgctccggattcgtttcttatatggaaaataaaatttcttgcaaagtctttcccacttttgcgcagactgtgctataatggaacgagtatgccggaaggatgtgagaaaatgtcaaaacagggcgatgccgcctacgcatggttcttaaagggctataattgcagtcagagcgtggtggcggcgtttgcaccccagcttggcctgaccgaggagatggccctgcgcctttccgcagggtttggcgcaggcattggccggatgcgggaggtgtgcggggcgttctgcggcgtggtgaccgtgctgagcatggtctatgccgaccccacagaccccaaggataaatcccggatgtatgcactggtgcaacaggcggcagagcagtaccgcacccgcaacggcggcggcagtatcatctgccgggagctgctggcaaaggcaggcgctgcccctgctgggggtacggcggcagaggaccgcaccgcagactattataaaaagcgaccctgcccggagctgtgccgcatctgcgccgacctgtgtgcagaatttattgcggcgcacccggagggacggcacggactatataaggaggatgcgtaaatgcagcttgaacaactggaattgaccggcggcggtacgctgacgctctacctgcgggagagcgtggaggccatgccgcatttccggcagcgtccgctggtgctggtggtgcccggcggcggctatacccacgtcagcccccgggagagcgaccccgtagcgctgcaatttgcggcagctggctaccacacggcggtactgcactacgcagtaggggagagcgcccgggatgcgctgcccatgcggcagctggcacaggccatcggccttgtgcggcagcacgcagaacagtggaatattttgccggataagatcgctttgtgcggcttttctgccggcgggcatctggcactgtccggtgcggtgtgggagatccccggcatggcagaccagccgcggcccaatgccttgctgctggcatacccggtggtcaccgccggagaatacgcccacagggacagctttgtgcagctgacaggcacgcaggatgttgccgcccaccagcgctttacgctggaggataagatcaccccggtcacaccgccggtgtttgtctggcataccatggaggacgagaccgtcccggtggaaaacaccctgctgttactgaacgctctgcacaaggcaggcgttccgtgcgaagcacacttgtttgaaaaaggctgccacggcaccagcatctccaccccggaggtggacgccgacagcgcccaccgcaaccgctgggttaaacttgcggtggagtggctggacgataccttttctttccatgcctgagataatcgactgaaacagaaaaagcgtttgtgaattttggccgtacctacaaaaaattcacaaataaaccgttgacttgcacaggcgtatgccgtatactgtccaacggggataaaaccacgaaagaaggaaacaaaaatggttatggatcccacactgccgcgcatcaaggtgcgcgatctgcttatgcaggcattcctcaccggctgggagcgctccgataagagcacctcgcaggacgaatacctgcaaagctctattcaggtcattgagatgcttcaggtagagccggaaaacctctacgcagaggaaggtcttggcctgccggacggcgaagaggtggatcatctggatgatctgctgcgcgcggacggcttctggctgtactacggggtggaagcagaaaacttcttcctgatccagtggtacccggacgaggcttctgccaatgcaaagcttgcccagctggaagaactgggcgacggcaagcagtatctggtagacctgaccctcaagcgggcaaacccttccgaggctgaaaacttcggcaattctaacccggtgcagctccgctcctgaaacaaacgttaacgtattgagttgaaaggaaattttgctcatgcagctttctgttacggaacgcgaacggctttatgccattttggaaaaatacgatcaaaaccccaaggtgcagcagatgcgggagttcatccagcacggggacgttaccacctatcagcactgcaagaatgtggtgctggtcagctgttggctgaaccatcggctgcatttgggtgcagacgagacttcgctggctgtcggtgctttcctgcacgatttttatctgtatgactggcacaaaaagggtaccttccatggcatccgccgcctgttcgagatgcacggcttctcccacccgggctgcgcctgcgtcaacgcagaaaaggtgttccatatcaccaaaaaggaacagagcatcatttccagccatatgtggccgctgaccttccgtcatgtgcccagctgccgcgaggccatcatcgtctgccttgccgataagtactgcgctgtggtggaaagtatgttcaagcacagccgtgtggctgccgccaaaaacgccaacggcgaatacgacgagtggtaaaactgaatcatcacaaataacaggagccgctgcaccaaaaaagtgtagcggctccttctgtcttatacgtcgtgaaaaaagcagagcgggaaaatctgcggatttttccgctctgcaaataaaaataattctgcgtccggtggggctggttacagctttttgaacccctccggttcgtctgcggcggcgcggcgctccatcagataggtgtccagccagtggccacggcagtcccgcgcaatgcgctcccggcgccccaccagccggaagccgcacttggcgtgcagggcgcggctggcggtgttgtcctgtaaaacggtggattgcagcgtccagtacccggccttttcagcggcggcgcacagtgcgctcaacagctgaaagcccagtccgtgcccacgaaactgctcgcctacatagatgcttacctcggccacgccccggtaacaccaccgggggtctacccggtgcaaagcacaccaccctgccagcaccccgccggaaaggatgaccagacggcactcctttgtgtgggaagcgtcccacgcggtatagggcgggcattcggtctggaaggtggcgtattccgtggcaatgccctcaacataaattctggagaccgcgccccagtcctccggcgtcataggccggatgatgatcttatccatactttcatcctcggcgggccgaaaattgcccgcattctctttccactcccggataaatttcagtatagcagaatttaccgcgcggtacaagaagcggactgcacagaaattgctttgacatcctacttgtttgtgatacaataagggaacaagaatgcggcgggggctgcgccgtctcccatggaggatgtatgagaaaaacggtctgggtactgctgtgtatggtttggcttatgctttgcgcggcgctgcctgcctttggcgcagagagcgcaccccatgtcacggcagaaactacaatggctcagctgcgcgcaaacccggcgatccagggaaccggctattatacatattgccgtgagatgacgccgctgatggtggaacgctggaaaaacaagaccttgcacgattattttggcgacaccgaccgggaatccggcattgctgcgctgaaccttatcattgataactataataagggcgtcaaggtcacctatcaggtctacacgcctgaggagatcgaacacaattccagtctgggctgtgtgcagctgttttattatccggccgagacccccaacgccaaaaccgctatcgtagtgcccggcaacgccttgaccgcaacctcggagatgggtgagggcggctccacggcctacgagctgcataaccggggctatgccgtgttcgtgttgcgctaccgcacctttttggatctgggcaataacgccccgctggaggatctggcaagggcggtgcagctggtgacaagtcttgacaaggagctttccatccatacacagggctatgcgctggtgggctactcctctggcggccagcttgtgggcgtgttcgcaaataaggagcgcggctacggctattacggcgctgcaaaacccggtgcactgctgttggcttatccggtagtgaacttttcagaggtaaagatcgcgtatcaggcgcttatggataccggcaactatgggtggcactattactgctccagtgtggcagatcttgtcacggacgattatccgccggtatttttctggtacgggaaggacgacaaggtgctgccttggatgatcaatcaggtgcagggcccggcgctgcaagcggcgctggaagcccacaaggtaccttatgttatgaaggtgtttgagtctgcgccgcatagtatcggggtgggctataccaccgatgccgagggctggctgacagatgccgtggctttctgggagcagcagaccgctgcctgaccataaataaaaaaggagtagaacatgatggatcagaatacttgttttgcatacctgaacatggagctgccggacgatatccgccgcctgaaagaggccggttactacgacgccgccattgcgcgcatcgatgcctgtctggccgaggactggactgccagccagaaccagcccctacacccgcagggtgcgctgccggtaaaccccaccccccacggagtggatgcgtggcggcagggtctattggcacaccgggagattttgcgccgtctgccgcgggactacaccctgaccgccgaccagctgttgaaccggctgcaggccaccctgcgggactttaccgcagaggagttcgccgcactggacgctgccgggcagatggactggcgctttgtggaagggcagaagcgctatatctaccgcgccgccgaaacgctggtggctacccatcccgaccttgccgcccgtcagctggacccgcccgtcccggagcgcagctgggatcgttttgagccccagcacgaccagatggtgcgcaccggtgcagtcagtgcagacatcaccctgcgcaccagcatcggcatgaccgatgagacctttgcccgtgcccttgccgccgcaaaggccgaaggcagagacaccgtgcacgtcaaggtgtggctgccgctgcccgctgcctgcccggcgcagagcaatatcacgctggacagctttaccgtgcagcccacttatatcgccccggaaactgcaccccagcgcaccgcatactgggagacagaccttgccgagaactgccgctttggggcacagtacagctaccgcagcaccgcgcactacgccgccccgctggagctgcacgccgacccggtgcagccggatttcgacaccgccgagcagctgccccacatcgcctttaccccctatatgaaggcactggctgcgcagctgaccgagggcatcaccgacccggtgcagaaggcaaagcgcatttatgattttgtcaccctgaacgtgcactaccacttccagcccatgtattttgtgcacgagaacatcaccgataactgcgcccgcagccgccgtggcgattgcggcgtgatggctgcaacctttatcaccctttgccgcattgcaggcatcccggccaagtggcagagcggcatggtggcacggccggagacagccggctgccacgactgggcaatgttctacatcgcgcccaagggttggatgtacgccgattgctctgccggtgcgtctatggcgcgtgcgggcaacgagaagatgcgtctgcactacttcggcaatctggataccgaccgcatggtggccaacagcgacatctgcgcccccttcgacccgcccatgtgttccttccgcgccgacccctgtgataatcaggtaggcgagatggaggtggacggcgtgggtctgtacggccagcaggtggagactacacacgaaatcgtaaagcatcaggaagtataagcacatccgggtctgccattaccgcaagacccggatttttgagttaaaggagaatgtctatgggatttttggcaggactgtatacgcttttgctggtggccatctgcctgttgcaggcacttttgctgtaccgcaccggcaagcccgccgcccggcaggatgatgaagccctgaaggagtggctgcgccagcagttggaagcacaggcgcgggtgttggaagaaaagcaggcgcagcaggcacagcagaatctggccgcaatggcacacatcagcgataccctgcaaaccgcagtgcagggcatgagcagcaccctgacggcaggacagaacacccagcagcagaccatggagcagcgcttgcaggggctggaagtctccaacgcccgcaagctggaggaaatgcgcaaagcgctggcagacggtcttgccgccatgcaggcacagaacgcccagaagctggacgagatccgccacaccgtggacgagcaattgcaggacgcgctgcaaaagcgggtgaccgagagctttaaggcggtcaacgaccagctggagcaggtgtacaagggcttgggcgagatgcagagccttgccgccgatgtgggcgggctgaagcaggtgctttccggcgtcaagacccgcggcattctgggcgagatccagctgggcgcgattctggaagagatccttgcgccggagcagtacgacaccaacgtagccaccatccccggcagcacccagcgggtggagtacgccatccgtatgcccggtgtggatggcaacagcgtctggctgcccatcgactccaaatttcccggcgatacctacgcccacttgcaggacgcacaggcttccggcgatgcgcaggcggtggaaaacgcccgccacgcgttggaactggtgctgcgcagcgaagcaaaggatatccgggaaaaatatgtggagccgccctataccacggccttcggcattctgtttctgccctttgagggtctgtatgccgaggtggtaaacgccgggctgctggaagttttgcagcgggattatcaggtgaacgtggccggccccagcaccatggcggcgttgctcaacagcctgcaaatgggtttcaagaccctcgccatccaaaagcgttccggcgaggtgtggcagctgctgggcgcagtcaagaccgagttcgataagttcgggcaggggctttccaagatgcagcagcgcctgcgccagaccgatgaagagctggataacctcatcggggtgcgcagccgcgccatcagccgcaagctgcgtgcagtgcagacgctggacgaaaacaccgccgccaccctgctggaactggacaccgagccgggcagaccggtaacagcgcgtctgccggagagcggggaagagctttgatgcgcagaagctccccgcattatcccttgcgaaatttctgacgatgtgctacaataggaattgttctcagaaatatttgccaatttacggcacaagataaacccaaaaggagtctgaacggtatgagcatgaaaaaaatcagcgaagccatccttggtgtgggcgtggacgataccaccatcgacctgttcgagagccagtatccggtgcccaccggggtcagctataattcctatgtcattctggacgaaaagaccaccattctggacacggtggacgcccgcgccaccgagccttggttggaaaaccttgccgaggcactgggcggccgcaagcccgcctatctggtggtctcccacatggagccggatcacggcgccaacgtggcaaagctggcagccctctacccggagatgcaggtagtgggcaacgccaagaccttccagtatatggagcagttctttggtgcagatgccattgccccggagcgccgcgtggtggtaaaggacggcgagagcctgagccttggcacccacaccctcacctttgtgtttgctcccatggtgcactggccggaggtcatggtcagctacgagagcagtgagaaggtgctgttctctgccgatggctttggccgttttggcgctgtggcaaagtttgacgaaaacgccgactgggcaagcgaagcccgccgctactacctgaacattgtgggcaagtacggtccgcaggtgcaggcactgctcaaaaaggctgcggcactggacatcaagaccatctgcccgctgcacggtccggtgcttaccggtgatctgggcaagtacctgaactactacgatctctggtccagctacaaggccgaggagccggaaaaggttctggtagccagcgcctccatccatggccacacccgtgctgccgcccacaccatggctgaaaagctgcgcgcaaagggcgcaaaggtagtggagatggacttgacccgtaccgatgtttcctacgccgttaccgaagccttccgctgcggcaagatcgtgctggcctgtgccacctatgatggtttcctcttcccgccgatggaaaacctgctgacccacctcaagaccaagaacttccagaaccgcaccgttggcctgatggaaaacggcacttgggcacccatggctgcaaagctcatgcgtgccgagctggagagcatgaagaatatcaccctctgcgagaacgtggtcaccatccgctctgccgccaacgctgccgccgaagcacagatggacgcccttgccgccgaactcgtggcaaagtaacacgatataaaatcagttgaacgcaaacactcccggactttctgcaaaagcccaggagtgttttttgttcctttgtttgtttgattatctgctagattatgagtgataaacacgaatttttacgtcgttttttgaaatgtcaacaaacaaaaaagcggtgaaacgaacaaattctgaacgtttcaccgctgtattctggagcaggatacgggactcgaacccgccgcctactgcttgggaagcagtcgctctaccggatgagctaaccctgcaagtgctccactattgtaacaaagcagggcaggaatgtcaaggcttttccgcacgaaatttgtggtcagctcattttggcccatgtcaggtccagcaccgggaaaaacgggtcgaataccaagtcgcgcacgccgttcgccagcagcagacgcttttgctgcgccatcaggggcaccacggtgcagctttccagcagctgctgctcacactgcgccagcagggcacagcgggctttgccggtctgctgggcgctcagtgccagccggtcggcataaacggtatcggcatagccggtcagactgccgcctgcggtggtgaactgctgcagcatctggtacacactgccgccctcggcacggatgggcgcaagggcaatggtgtatttcccggcggcaatgcgggcgtcaaactcgtcctgttctacctcttccaccgagaagaacagggagcactccttttgccatgcactgttgatctggtcggccagttcggtcagcccagcactcttgggcagcagcagggtcacaccggaaaaatctgaggtagccatgccctgccgcgcagccagatacaaagccttaggttcagagatggtgggcaggggatcgccggcagtttcgcggtagtccagcccatccacggtcagcccctccggcacaagcccctttgcggctgtgtataggccgctggagggcacatcggcgttttcccgggcaataccggccagcgcctgccgcagctgctggttctggaacaccgacccctccgccgcgttgaacagcagcgcccatgtggtgtcggagtagcttacggtctgtaagctggtggcctcgccgctctcatccagcgcggcagagcatttgtcgtcagcaataagctgggctgcgcttttgccgctgccgctggtgtcctgcaccagacgcagactgccgaccagcgggctttccacggtgcggcgcaaaaacaggccgtttgccgtccagttatacagataaaagctcccgctggaaagcgtagtcttgtcggtcagcccataggtgccccgggtgctctcaaaaaaggcctcgtcacagggggctgcaccgggcatggccagctttgccaaaaagttatcgtcccgctcgctcagccggaacaccaacgacagtgccccattggctgaaacgcccagactgctttcgtccgccagccccgccagcacggcggcgctgttctgaatagccgaaaactccaccgcatagggcgaggcggtatcggcgcggaaaatacgccggaaggcgaacacaaaatcctcggcggtaatatcgtactctgtagctgcacccttggcggcagcgtagcgcaagccgtccttcagggtaaaggtgtaggtcagcccgtccggggacaccgtccactcttcgcagagccccggcacaagctcgccgtccgggtctttgcgcaccagcgtgccgtacagattctcgcaggcgatgacatccgacgcaccggaggccacctgcgggtccagatttgcagggatgctgtccacgaaccaagtaaagctggcagagtttgtggaactgccgcagccggtcagggcaaaaagaaacgcagcagccagcaccgctgcggtaaaacgcaaccatcgtttcaaaaagaataacctcattccgtttatcttcgcgcagaaacggcaaaaagcgctctgcaacgacaagtgtagcagaaagcaacagaaaaaacaattgcctttttgtgaatttatcgggctttttgaagcagactgtgcggttttccgttgccaattgcgcacaaatggactataatggtacagcaaagtgatccccgcgctgcccgtgcggcgcggtgttataccatgatcctattagaggaggaactgtttttatgcagaaagatcagcagaagcttgcccagcttattcagggcaaaaaggtcgcctttatcggcgcaggcgtcagccacaagaccctcatcaaggagtttgtggagctgggcgctcatgtgactttgtgcgaccagaaaaagagcgtggaggactttggcgattacgccgccaccatccgggagctgggcatcgacctgagccttggcgaaaactatctggacggcttcaaggggcaggacatcatcatgcgcaccccgggctttgtgggttactttgaaaagcccctgcaggatgccatggccgctggtaccatggtcaccagtgaggtggaactgttcttcgatttctgcccctgcgagatcgtggccgtgactggctcggacggcaagaccaccaccacaacccttatctccaaattctacgaggccgcaggccgcaaggtgcatttgggcggcaacatcggtgcagccctgctgcccatgctgccggaggtgtccccagaggatgtggctgtggtggaactttccagcttccagctgatcagcatgcacgcaagccccaatattgctgtggtcaccaacgtgaccccgaaccatctggatcaccacaaggatatgcaggaatacatcgatgccaagcgcaatatcctgctgtaccagaagcagccctgccgcgccgtgctgggctatgagaacgagatcagccgctccatgcaggcagactgcaagggcaagcaggtgtggttcacccgcctgcacgataccgacaacggtgccttcctgcgcaaggatggcatgctctgcatggcagaggatggtgttgtgacccccttccttgcccagaaggatgtcaagctgcgcggtctgcacaacatcgagaacctgctggctgctgccgctgccgtgtggggcgaggtgcccgtagaagctatccgtcaggtgggcagcaccttcaccggcgtggagcaccgcattgagccggtgcgtactctggacggcgtgctgtactataacgattccatcggcactagccccacccgcaccatcgccggtctgcgcagctttgaccggaaggtcatcctcatcgcgggcggctacgataagcacatcccctacgagccgctggcaccggagatcatcgcccacgtcaaaaatctggtgctgatgggcgcgactggcccccgcatcgagcaggctgtacgggagtgctccggctttgacgaagccgcgctgcccattcagcacgcagacaatatgcagcacgccgtagaactggcgcgcgccgcagcaaagcccggcgatatcatcatcctgtccccggcaagtgcttcttttgacctgtaccccaactttgaggtgcgcggccgcgagttcaaaaaaatcgtcaacgcgctcaagtgattgcacaggtaaaggatgcaaagcgccgtacccggttcgcgaatgcctgccggggtctgccggtgctggacactctgctgccgctggactgtgcactctttcaaaaaagtcagccgtggcggttctacgcgggtcccacgctggcactggaactttccggcagcacggcatggctggccgggcacgcaaaccccgcagaactggcaggctttttgtccttctgcgggtgcgagagtgccattctggacgggactgtctgcccgccgccggacggctggcacaaggcggaagcactgaccgtgttcggtctgccgcaggctgggccgctgcccctgcctgccgtggacgaagctttgtgggcacagctatccctctgccgggaagcacccgccgcccgggtggcagcagcgctttacccagcagaccccgcccggcaggcagatttttactcagaactgtgcacaaagcgcagccggggcagggcagtggcgtggacattggagcaggggagtacagtcgtctgcaccgtgggcgcttatgccctgtgcaatgggcaggcatatatggcctgtgggcagaccgcagagccgctgcggggcaagggcatcggcgggcggctcattgtggaaatggctaacagccttgccgccgaagggctgcgcccggtattcctctgtgcaccggagcgggtgcggttttatacccgccttggctttgcaaaacaggcagagtacgcccgctatgtgcccgagaaatgttaaagcttcttgcacaaagaacccaataataacaggaaggaactatcacgttataatgtcgattctgaaccacttttttgattataagcccgaggtgctggcgctggacgaaaaggccatggagttgtgccaaccctacttccgccagatggaggaaatccgggatttcaaccagctgaagatgctcaaggcctttgccgatacccagatgtcctccaccgatatgctgggcaccaccggctacggcctgtgggataccggccgcgccaagctggagcagatttttgcgcaggtcatgggcgcagaggatgcactggtgcgcagccagttccaaagcggcacccacacgctggcggtggcgctgttcggtctgctgcgggcaggggacaccctgctggccgccaccggccgcccctacgatacgctggagggcgtcattggtctggacggcaagggcaagggcaccggtaccctgatggactacggcgtaaactatgacgaagccccccttaaagcagacttcaccccggactacgacctgatcgccaaaaaagcccctggtgcaaaggtatgccacatccagcgcagccgcggctatttacagcgcaacgcctttgatctggctaccatccgcaaaattgccgataccgcccgcgccgcaaacccggagatcatcatttttgtggacaactgctacggcgagttcacccagacgcaggagccctgtcaggtgggcgcggatatcgcagtgggcagcctgatcaagaaccccggcggcggcattgctcccaccggcggctacatcgtgggtcgcaaggatctggtggaactgtgcgcttaccgcctgaacgcccccggccttggcaaggagttgggctgcacgctggagaccccccggaatatgtatctgggcttctactacgcccccggtgtggtgtgcgaggccattaagaccgccatctacgcccagtgtatgctggagctgctgggcaaaaagcccatcccacgctactgcgaggctcacaacgatatcgtcacctgctttgatgccggtacggcagaggcgctcatcggcttctgtcagggtattcaggctgccagccccgtggacagctacgccgccccggaacccagcccggagccgggctacaccgacgaggtggtcatggccagcggcagctttacgcagggcagcaccatcgagctttcctgcgacggtcctctgcgcgccccttatacctgttatttgcagggcggcttgaactttgccgccagccgcgccggtgtgctgctggctgtccagaaagcttattttaaggagtaatgtttgccctgcgggcaggatatcattataacaaaaggagctatcgcacaacacgctgcgatagctccttttttccctctatacacaaagtaacacacaaataaacgcttacacggcacgggcctgcatggcggggatcggctcgatcatagccgggtgcatcccctcacggtagtccagatctccctgatccagaccacgcagcagcacctctgcggtagcaatgttggtggcaatgggtacgctgtgcatatcgcacaggcgcagcagattctgttcggtcaggctggcggcatcggccttcagcgggtcgcggaagaacagcaccagatccacttcatcacaggcaacgcgggaggtgatctgctgtacaccgcccagcttgccggaaaggtagcagtgcaccggcagaccggtagtctgggcaagcatccggccggtggtaccggtggcgataacattattgcgggaaaggatggcactgtaagcggtacagaactgcagagccagttctttgcgggaatcgtgggcaagaattgcgatcgtcataggatgctctctcctttacttatttttacaatgcaccagttatgatgtacgaattttgaaatcctgtgaaacgggagtgaaatcgatatcaaatcttacactatagttttaccgcacaaaaaaagctctgtcaagagaaaattttgcttttttgacctataaaaacataaaagtactacttttacattgtgagaaacggcgaattcttggatacataccgctatccaagaacgctcgttttatgggaaaggtgaaaaatttttcagttttcatattcattttaaaatacagtccatcccggtaaaacaaaaatacaggccgaagcagcttgcatcggcctgtacaggaaatttttttcaactgtgaaaaacttgctctgccgcgcccgcaggccggacagaattgtaaaaaaattatgaagaagccggggcaggggagatcagcgaatctgcccgtcaccgtggataacgtacttgtagctgcaaagttcctccagccccatgggaccccgggcgtgcagcttctgggtagagatgcccatctcacagcccagaccaaactcgccgccgtcggtaaagcgggtggagcagttcacatacacagcggcgctgtctaccgcagcggtgaaccggtcggcgtctgcctgcgtctgggtcaggatggcctcgctatggccggtggagtgctgcgcaatgtgggcaatggcctcatctacactgtccaccaccttgacggcaaggatgtagtccaaaaactcggtgtcaaagtccgcagggccggcaggcgtgccgggaatgatggcggcggcgcgtgcgtccagccgcagctctaccggcagcttgcccgcagccacgcggtcggggccaagacgctgtgcaagcttgggcagaaactcctgcgcaatggcagagtgcactagacacacctcctcggcgttgcacacgctggggcggctggccttggcgttttcaataatatccagcgccttggcctgatcagcggtgtcgtccacaaaaatgtggcagatgccggtaccggtttggatgcagggcaccttggcgttttccacgcaggcgcggatcagccctgcgccgccccgggggatcagcagatccacatagcccacggcggtcatcagggcgttggcagaggcgtgggtggtgtcctcgatcaggcagaccgcgttttccggcaggctgttctcccgcagtccctgccgcagcgcctgtacaatggcgttggcgctgcgccatgcctccttgccgcagcgcaagatgcaggcgttgccgctcttgatggcaagggcggcggcatcgctggtcacgttgggacggctctcgtagatgatagcaatcacacccatgggcacggcggtcttttcgatcaccagcccgttggggcgctccacccgcttcagcacccggcccaccgggtcgggcagggcagcgacctcttcaatgccctttgccatggcgcggatgcgctcctcggtcagggcaagacgatccagcatcacctcgctgatatgtccctttgcagcggccatatcgtcggcgttggcggcaaggatagccgtcatgtttgccgggctgcacagctgcgcagccatactgcacagtgcctgtgcgcggctggcgctatcagccagtgccagcgcagcctttgccccgcgggcggcttccagaatttcctgtgtggtcataggtcaaacctcctgtgtggacagcacgggctgcttgtgcccggcaaaacgggtgccgatgggcttgcccgcagcgatatcatacagcagttccgggtgtgcgccgttggcaatgaccatatctgcgccgctgccggtcaccatgcgggcagcccgcagcttagtggccatgccgccggtgcccagtgcggagcctgcaccgtctgccagcgccatcacctccggggtgatctcctccaccagcgggatcagtgccgcatccgggtgggtgtgggggttcgcagtgtacaggccgtcgatgtcgctcagcagcaccagcaagtcggccttgcagcagcaggccacaatagcagccagcgtgtcattgtcgccaatggaggtgatctcatcggtggcaacgctatcattttcattgatgatgggcagtgcacccagttccagcagacgggtcagggtgttctggatgttcacccggcgctcggtgtgctccacgtccacgccggtaagcaggatctgcgctaccgtgtgatcataggcactgaacagccggtcgtaggtgtacatcagctcgcactgccccacggcagcgcaggcctgcttggtggtggtatcctttgggcgtgcaggcagcgaaagcttgcctacgcccatgccgatagcgccggaggataccagaatgacctcgtgtccctcgttctttaaatcgctcaataccttgaccagttcctctgcatggcggatgttcagccgcccggtggggtatgccaatgtggaggtgcccactttcacaacgatgcgcatgattccattaaccctttcccatttcctttgttttgtcgtaagcagccagcacggcatccatcaccgcaccgcgcagcccatgttcttccagtacccgcacgccctgaatggtgctgccgccggggctgcacacagcatccttcagcgcaccggggtgcttgccgctttccagcaccagctttgcgctgcccagtaccatctgtgcggcgtattcctgtgcctttgcccggggcagaccgcaggccacgccgccatcggccagcgcttcaataaactggtacacccatgccgggccgcagccggagacgcagcttgcggcatcaatcatgccctcggctacggcgtccagccgcccggcgggagccatcagctggcagaatgcagcctcttcctcggcggttacgttggcagagcaatactggatcatgccttcgcctaccgacgccggggtgttgggcatgatgcggatgacagggtagtcgccgcccgccatctcttgaatgcgtgccaccggcaggccggcggccatggtgcacagcacgaaccgcttggtgcgctcggcaaggatgaaccgcaggggctccagcatggcttccatcatctggggctttaccgccagaaagatcaggtcgcagttcccggccacctcggcgttggtggcggtctgacagcccagttctgcagccagtgcttcggccttggccgccgtgcggttggccagaaatacattctcaggctcggtagccttgcacacagcgcgggcaatggcaccgcccatgtttccacagcctaaaaacccaatggttttcatcataataataaccctccctcggcaggtatgcactgcataaaattctgcttcttattcattctaagcaaccgctgggagaaaatcaagacttttgtcttatttttggcgggcagattgaaaaacagcaccttcgcggcgggcagcgcacacacaaacttcataaaaaggtaagaatctctacttgaaataaggtcgtattttgcggtaaaataaactatggggtatcatttacggaaacggcagaggagtctgccgggaaaggatgggtttttgtgtcacaaacgacaaaacgggcactggaggcatctttcaagaagctgctgctggaaaagcccctgaacaaaattacgatcaacgatatcaccgaggactgcggggtcaaccgcatgaccttttattaccatttcaaggatatttacgatctggtggactggatcttggcggaggatgccgccaaggcaatggaaggccgccggggttttggtacatggagcgaagcctatctggacgttctgcgccaactgcaggataacaagacccttgtgctcaacgtttaccgctcggtgggcagggaacaggtggagcagtacctttataggctgctggaccccatcctgaaggattttgcggaccgtgaatgccacgatatcaccgtgcaggacgcagataagcagtttgttgtcgatttttacaagtatgcactggtgggtatgacgctggaatggacccgccgggatatgagaggcgaccccaagaagatggtggagcgcgtgagcaccatgatccacggggatttccgccgggcgctgtgccgcctgagcagcggcagcttgaaaatagaggaatgatgtgctttgtggctgtgcggcttcaataaaattttatcaaaggatacgccgtgatgggttttccatcacggcgtattttctgtttatggcacaaaaacgcgcaaagtggtaggatgtggtcaagcaaaataaggatttccaaaggaatcatttcgggaggaaaaagttatgaatacatctcttgataatctgactcacaagatgcagcgtgctgcgcttggtaaaatagtggacgtggcgctttcccgcgccgagcaagaccgtgaaaaaacaatgtgccagctggtagatgctgcaaagcagttctacggcagcggcttcagcgacgagacctacgagaacgccaaaaaggtgctgaccgaccccaatagcaagtggacgaaactcatcaactgcgtgctggaccagaccgacccccatgtggcgcgtaccaccgcgctgaatctggggtacgaagccttcttccgcggcactaagatgatccgtgagaaccgcgtcaagtaccagtgcaacatcccttggctgattttgttcgaccccacctctgcctgcaatatgcactgcgtgggctgctgggcaggcgagtacggccacaagaacaacctcagctttgaggatatggacaagatcgtcacgcagggcaaggagctgggcgtgtacctgtatatgctgaccggcggcgagccgctggtgcgcaagaaggacgtgctcaagctggcagaaaagcacaacgatgtgcagtttgccatctacaccaactccaccctcatcgacgagcccttctgtgaagaagtgcagcgtctgggcaatatcgcctttatgctgtccatcgagggcaccccggagaccaacgacgcccgccgcggcgaaggccactatgccgctgtgatgcacgccatggatctgctcaagaagtacggcattatcttcggcacctccatctgctacacccgccagaacatcgaggccgtcaccaacgatgcgttcatgcggctcctttgcgagaagggtgcacacttcggcttctacttccactatatgccggtgggcaatgaggccgccccggagctgatgcccaccccggaacagcgcaagtatatgatcgaccgtatccgctatctgcgctcttctgcgtgcgatatcccgttctaccccatggacttccagaacgacggcgagttcgtgggcggctgcatcgccggcggccgcaactacttccacatcaactctgccggtgacgccgagccctgcgtgttcatccactactccaacgccaatatccacgaccagtctattctggaaattctgcacagcccgctgttcatggcttaccacaacggtcagcccttcaacaagaaccatctgcgtccctgcccgatgctggaaaaccccgagctgctggaaaagatggtgcacgagaccggtgcccacagcaccgacctgcagtctccggaaagcgttgagcacctgtgcgagaagtgtaaggcttacgccgccgactggcagcccaccgctgatgagatctggtctcaccacaagatccgcgagagccggtatgagaactataaggactggaagccttctcagccgcaggactgaactgaaacctgattcaaaacaataacaagacccccgccctgtgttcctgcccggaacataaggcgggggttttgctgtgtaaactggaattttttacttcttcatcttaggcgcaataagcagcacgactgttacaaggaaatataaaccatacagtaaccaagtaatggtattgttccaaggaaaactcatttctggatggttcaatgcaaacattataaatataacagctataatcaacattagcaaaccgataatccttgacgtgctctttttcatgtaaatcacctcgtcaaatttgacctataatacgttaaaaataccccgcatcggaagggctctgatgcggggcagggaagggttactggttttcagcaggttgcgatgcagcgggctgtgcggctgcatcgtctgcggggtcgccgaactggtcgtgatagctgttcagcagggtcagctcctgatggcgctgcaagccgtgaatgaccagctttttgatgacgtcgtagataacggcgaacagcggcacacccacgatcatgcccacaaagccccacaggccgccaaacagcaggatggcgaacagtacccagaagctggaaaggccggtggtgttgcccagaattttaggtccgatgatgttgccgtccagctgctgcaaaaccagcacgaacagcacgaaccacagcgccttgatggggctctggatgaggatgagcagcgtggcgggaatggcaccgatgaaggggccgaagaagggaatcacgttggtcacaccaatgatcaccgataccagcagcgcactggggaacttgaaaatcaggcagccgatatagcacagcacgccgatgatggcagagtccatgatcttgccgttgatgaaaccgccgaacattttgtctgcgtacttcacttcctcagtgatcagctgcgcccagcgggggcggacgatgctgtgcagcaccagcttgccttgctgcacgaaccgcttgcggctggccagcatatacaccgccacgatgatgccgatgatcaggtttttggccaccgtcaccacgttcagcacaccaatggctgcaccacttacgatattctgcatggagggcagcagggtgttcttgagccatgtgttccatgtgtccagattggtattcagggcagcgtaagccgaattgagcagctccgtgatctgttcgttcttttcaataaactccagatggtttgcccagttcatgaactttgtaatgttggcctgcgcggtgtagtacagggtagtcacgctggtgatcagctgcggcacgatcatcatgacaagcgcatacaccagcaaaagcccgaacaggatggtaagcgccacggacagcgcgttgatcagaccgttcatcttttccgggatgaaccggcgcagaaagttttcgatgctgttgcacaccggcttgagcagataggcaatgacggcaccgtagataaagggcatcaagatgccggtcagggtagagatggccgagccgaagccgtcaaagcggtaaatgaggaaaaagaagatgatgctcagtgcaatggcaccaaaccctgcgagcatcccatagagatacggtttgatgtgcggctttttgtccatcatgacaaactccattcctgctgcgggcagcgggaatacccacagcgcttattaaattttgttgcttctgcgccagatgtgcagtttttcagcctcgcggatcaactcttcacggaagtccgggtgtgccacgctgatcagagcctcggccttttcccaagaggtcaggcccttcagattcacgcagccatactcggtgcacagatagtgcacgttggcgcgggtgtcggtaacgatgctgccgttctccagcgtgggacggatacggctttccagctggccggtctttttattaaagaaggtggaggacaggcagataaagctcttgccgcccttggaaaggtatgcgcccagcacgaagtccagctgaccgcctgcgccggaaatgtgcttcacaccggcgctttcggcattcacctgaccaaacaggtcgatatccacggcattgttgatggaaataaagttgtccagtgcggaaatgctgcggatgtcgttggtgtagtccaccggggcagacatacactccgggttatcgttcaggtaatcgtacatcttctgggtgccggcaccaaaggcgtagacctgacggcccttgtccagctgcttgcggctgccgttgatcttgccggccttggcaatatccacaaaggcatccacatacatctcggtgtgcacgcccagatccttcagatcgctctgcgcgatcagcccgccgatggcattgggcataccgccgatgcccagttgcaggcaggcaccgttaggaatctgcggcacgatgaggttggctaccttcaggtccacctcagtagcggcaccggcagctgccatctggccgatggggggatttgtgccctccacaatgccacttacctgagaaacgtgtacgctgttctccatgccgccaaggcagcgcggcatattggtgttgacctccacaatgatcttcttggccttttcgcacacagcacccagatgcgaagcgctgggaccgaagttgaagtagccatgctcgtccatgggggtcacctgaaatactgccacatccacggggtcgctgctctcgcggtagtagcggggcagctcagagtagcggatgggggagtagaaggagaaaccttgcgcaatggccttgcgctcaatgccgcccatgtgccagctgttccaggtcatgtgggcagcagggtcgtcgatctggaagatctccggcacccacatcagaatgccgccccggaagttgactccttccaactccggcaggcgttttgctagctcggcgtccacggccacaggggtgttcacggcccagccgtaatccacccagtcgccgcttttgaccagagcggcagcctgcgcagcagtcataagcttctgtgcgtacagttccttgcaatccattataaaccatcctctcttaaaatacataaaagaattgtaaacaattctgtgcggacaaattatgcggctgttttacgcctgttttgcggaatgcacaccgttttgccacatctgtatggtaaccttataaacaaggtagcagtgtgtgctccgctctgcgcagaacagctcaacttagttataacattaacaaagtgtagaatcaatagttttggctaaaaaacaaccagtatagcataacaaacagttttcttggctttatgtggggattgtttggtacgcaaaaaacaaaaaagttgagaaaaagacttgataaaattttgacgatgtgctttactaatagcgtgggaagcaactgcggagcagtgcgagatgattcgtttaaaatttaacgataaaacgcaccgcagcagtttcaggttgcacccaaggctggaaagtgctatcatggcagaaccacatcgcgcttaataattgcagcgcataaggaggacactgaccgatggcaacagcagtttatcccgggtcgttcgatccggtcaccaagggacaccttgatatcatcaaacgcgcagcaaagatcaacgaccacctcattgtggcggtgctgatcaacagcgccaagcatccgctgttcacagtggaggagcgggtggctatgctgcaggaatgctgcaagaacatccccaatgtgaccgtggaaagcttcgacggcctgaccgtggagttcgcaaaaaagcgccacgcatccgtaatggtgcggggactgcgggcagtaacggactttgaaaacgagatccagcttgcgcaaaccaaccacgcactgatgcccggcatcgagaccatgttccttgccaccagcatcaaatggagttatctttcctccaccatcgtaaaggaagcagcgtactacggcagtgacatcagcaagttcgtcacacccaatgtggaaaaagccgtcaacgaaaaatacgcacagctccgggagagggaagagatctgataccgcaaaaatgccgcagggcgttttgataaatgggtaaccgataagtaacacacatacacaattcaggaggctattcacatgaaaaagattgttatcgcatctgcatgccgcaccgctatcggcaagttcggtggcactctggccaacgttcccgctactgagctgggctccatcgtcatcaaggaggctctgaaccgtgcaaacgtcaagcccgagcaggtcgatcatgtttacatgggctgcgtcattcaggctggtctgggccagaacgtcgctcgtcaggctgccctgaaggctggcctgcccatcgagactcccgccgtcaccgtcaacgtggtctgcggctccggtctgaactgcgtgaacatggctgctcagatgatcgaggcaggcgatgctgatatcgttgttgcaggcggcatggagaacatggatatggctcccttcgcactgcagaaggctcgctatggctaccgcatgggcgctcccatgggcaagagcgagatcgtggataccatggtcaacgatgcactgtgggatgcctgcggcttcaacaagcacatgggcatgaccgctgagaacgtttgcaccaacgagacctaccagaagaagtacggctacagccccatcacccgcgagatgctggacgagttctcatacaacagccagctgaaggctgacaaggccatcaaggacggcgccttcaaggacgagatcgttcctgttgtcatcaagggcaagaagggcgacaccgtgttcgataccgatgagggcccccgtctgagcgctcccgaggttctggcaaagctgaagcccgccttcaccaaagacggcatcgtcaccgctggtaactcttccgccatcaacgacggcgctgctgctctggtcgtcatgagcgaggagaaggctaaggagctgggcgtgaagcctctggcaacctgggtcgccggtgctctggcaggcgttgagcccgaggtcatgggtctgggccccatcgctgctaccaagaaggtcatggccaagaccggcatgaccgttgctgatatggatctggtcgaggccaacgaggcattcgcagcacagtccatcgctgtcggcgaggctctgggcttcgataaggacaagctgaacgtcaacggcggcgcaatcgctttgggtcacccggtcggcgcttccggcgctcgtattctggtcaccctgctgtacgctatgaagcaccgtggtgctcacaagggtctggctactctgtgcatcggcggcggcatgggctgcgctaccatcgttgagatggactaagcactctttctctgaatcctgactgaaccacagacccggagcgccggagagaaccggagagctctcccgcgttccgggggctgttttgaaaaaactgaactgtatgaaatggaggttttcacaatggcatttgtaaaaaccgaggtgcagggcgctgttgagatcattactatcgaccgtcccaaggcactgaacgccctgaaccccgaggttctggctgacctgaaggctgcttttgaggcagtcgatcaggagactgtccgctgcatcgttctgaccggcgaaggcgacaagagcttcgttgctggtgctgatatcggttctatgagcaccatgaccaaggcagagggcgaagccttcggcaaactgggcaatgatgtgttcctgatgatcgagcatttccccatccccgtcatcgcagccgtcaacggctttgcactgggcggcggcaacgagctggctatgagctgcgatatccgcatctgctctgacaacgctgtgttcggtcagccggaagtcggtctgggcatcaccccgggcttcggcggcacccagcgtctggctcgtctggtcggcatgggcatggcaaagcagctggtctactctgcgctgaacatcaaggctgacgaggcttaccgcatcggtctggtcaatgccgtgtatccgcaggctgagctgatggagaatgtcctgaagctggccggcaagatcgcaaagaacgctcccattgctgtgcgtaactgcaagaaagcaatgaacgacggcatcagcctgcccatcgagaaggctgttgaggtcgaggagaagctgttcggcgattgcttcgagacccacgaccagcaggagggcatggcctgcttcctgtcccgtgagaaaccgaagcccaaggcagtgttcaccaacaactaatccattacataatttttgatattaaaggagagatttcctatgaagatcggtgttatcggcgctggcactatgggtcagggcatcgcaaaggcatttgcacaggttgagggcaacaccgttgctctgtgcgacatcaagcaggagtgggccgagaatggtctggcaaagatcaagaagggctacgagaagctggtcgctaagggaaagatgacccaggagaaggctgacgctatcgtcgccgccatcaccccgggcctgaaggaagatctgtgcgcagactgcgatctggtcgttgaggctgctttcgaggatatgaaggtcaagcagaccaccttcggtgagctggataagatctgcaagcccgagtgcgtctttgcttccaacacttcttctctgtccatcaccgagatcggcaagggtctgacccgtcccctgatcggtatgcacttcttcaaccccgcagaccgcatgaagctgattgaggtcatcgccggctgcaacactcccgccgagaccgttgagaagatcaaggagatctccgttgccatcggcaagagccccgttcaggtcaacgaggctgccggctttgtggtcaaccgtatcctgatccccatgatcaacgaggctgccttcattaagatggagggcgtttccgatatcgccggcatcgacaccgctatgaagctgggcgctaaccaccccatgggtcccctggagctgggcgacttcatcggtctggacatctgcctggccattatggacgtgctgtacaacgagaccggcgacagcaagtaccgtgcctgcccgctgatccgcaagatggtgcgcggcggcaatttgggctgcaagaccggtaagggcttctacgtttacaacgcagaccgcaccaagacccctgttgaccagctgtaaattctgataaacatttctcccggctgcggggaaagcggtcgggaggaatttgtttgcaccgggctattccggtaaatgaaaaaagacctgttaggaggatatagcgatggattttactctgtccaagcagcagcagatggtgcagaaaatgtaccgcgagtttgctgagaacgaagtcaagcctctggcaaagaaggttgacgcagaggaatacttccccaaggagaccgtcgaaaagatgggcaagctgggcatgatgggcatctatttcccgactgaggtcggcggtgcaggcggcgatgtgctgtcctacgtcatggccgtggaggagctgagcaaggtctgcggcaccaccggtgtcatcgtctctgctcacaccagcctgtgcgctgctcccatttacgagaacggcacccccgagcagaaggctaagtacctgccgaagctgtgcagcggcgagtggctgggtgctttcggcctgaccgagccgggcgctggtaccgatgcgcagggtcagcagaccattgccaaggaagatggcgattactgggtgctgaacggctccaagatcttcatcaccaacgcaggctttgctgatgtgttcatcgtcatcgccgttaccgataacgtgctggataagcgcggccgtcccaccaagctctgctccgccttcatcgtggagcgcaccgacccgggcttctctgttggtaaggcagaggacaagatgggtatccgcggttcttctacctgcgagctgatctttgaggattgccgtatcccgaaggatcgtatgctgggcgtgcgcggcaagggcttccagctggctatggctacgctggacggcggccgtatcggcatcgcttctcaggctctgggcattgccgagggcgctctggaggagaccattgcttacgtcaaggagcgcaagcagttcggccgtgccattgctgctttccagaacacccagttcgagctggctgagatgaaggctcgtgttgaggctgctaagtatctggtttatgctgccgctctgaagaagcagcaggctatggatggcgcaaaggttcgttacagcgtcgaggctgcacaggctaagctgatcgcagcccgcaccgcaagcgatgtgacccgccgttgcctgcagctgttcggtggttacggttacacccgtgactaccccatcgagcgcatgatgcgtgatgccaagatcaccgagatctacgagggcaccagcgaagtgcagatgatggtcatttccggcgcgctgctgaagtaagggaggcaagagttacaatgaaagcaattgtttgtgtaaagcaggttcctgatacctccggcaaggtgtccgtcaagcccgatggcactctggatcgtgcatccatggcaaccatcaccaaccctgatgacctgaacgctctggaggccgccctgaaactgaaggacgccaccggctgcgaggtcgttgttgtcaccatgggtcccccgccggcagagggcatgctgcgtgagctgctggcccgcggcgctgataaggctgttctggtctccggccgtgagttcggcggttccgatacctttgcaaccagccagatcctggctgctgctgtcaacaagatcggcgttggccccgaggacgttgtgttctgcggccgtcaggcaattgatggcgatactgcacaggtcggcccccagatcgctgaaaagctgcatctgccccaggtcacctacgttgccgacatccagaaggacggcaacaccctgaccgtgaagcgtatgctggaggacggctacatgatggtcaaggtgcagactccctgcctgctgacctgcatcaaggagctgaacgacccccgctacatgagcgtgaacggcatctttacctgctacgacaagcccatggaagtgttcgactacaacgcactgaaggacgatccgctgatcgaggtggacaccattggcctgaagggttctccgacgaacgtctttaagtccttcactcctccgcagaagggcgcaggcaccatgctgcagggcgacgatgttgccgcccagcttgctggcatcctggccaagaagcacctgatctgatgaaaggagcataggattacaatggctgattttaacgaatacaaaggcgtatgggtcttttgcgagcagcgccagggcgcactgatgtccactgacttcgagctggttagcgaggcccgtaagctggccgacgagctgggctgcgaggtcaccggcctgctgctgggtgacaacgtggagggcattgccaaggaactgggcggctacggtgccgacaaggttctggtctgcgacagccccctgctgaaggattacaccaccgacgcatacgctaaggtcgtgtgcgatatggtcaacgagtacaagcctgaggtgctgctgatcggcgctaccaacattggccgcgacctcggcccccgctgcgcagcccgtctgcacaccggtctgaccgccgacgctacccatctggatatcgacactgcaaagtacatcgacttcctgaaggagagctccaccatcgacctgtccaagcagaagttcgatatggaagatcgcaacctgaagatgacccgtcccgcattcggcggccatctgatggctaccatcatctgcccccgcttccgtccccagatgtccaccgtgcgtcccggcgttatgaagaaggctcccttcgatcaggccaaggctgatgcctgccagatcgtcaagcccgccttcagcctgaccgctgaggacatcaagaccgaagtgctgagcgtggagaaggccgctgagaagctggtcgacctgatcggcgcagatgtcattgtctccgttggtcgtggtatcagcaaggatgtcaacaagggcatcgagctggccgagcagctggcagccgctctgggcggcggtgtcgtgggcgcttcccgtgccgtcaccgatgcaggctggatgaccgctgaccatcaggtcggtcagaccggcaagactgtgcaccccaagatctatgtggctctgggtatctctggtgccatccagcacaccgccggtatgcaggattctgagtgcatcatcgctgtcaacaagaacgagggtgctcccatcttcggcgttgctgactacggcatcgtgggcgatctgttcaaggtcgtgcccgagctgatcaagcagatcgaggcagcaaaggctgctctgtgatcatctgacccgagcatagttcaatagcatagcctgaattgtgagaggccgttgcacattttttgtgcagcggcctcttttttgtgttttttataaaggagctgttgtgccgggtactgcacagcggctccgatttgctccacaggaaaggaacgcagaagggaacacagcgaagcgccacaaaaacgtacacagaaaccacgatatgcaaagcggtgcatataaatacagtaatatacaaaacgaaacgcaccgaagtgtcccaaaaagtgtgcggaagctgttgcacttggcttgttttggcgagaagcgcaacacaactgtaacgtttttggactctttgttacgcttgagttgcgataaaaaggcgagaattttttaaaaaatctgtattttttctgcaaatcaacctctaaacctcttgacgtctgtatggttttgtgatactcttgtgacacaagagttgcggatatgatatgacagagttgcaaacgagttgcaatatccaagatcacactgcataaggcaacagaccggaggcaatcttatgaagcgtgcaatgaataccgtgaagaatatcgcagcagctgcaatgacgctggctgtgttttttggctttgcaggcttcaagcccgtcaccgcaaacgctgcacaggctgccatgcctgccaccgcttctgtggaagaagagaactcctactttgaggaagacgcttaccagcgcagcttcctgaccctgatcaataacgagcgtgcacaggctggtctggctcctgttgctctgggcgacagcaaccacaacgccgctgcaatggagcgtgccgaagagctggcagtttcttactcctacgttcgtcccaacggtcagcgcgatttcaccgttctggcagagaacggtatcagcgatgtctccatcggcgagaactacatggccggctgctccacccccgattccgcaatggatcagtggatggctactgacttcacccgtgagcgtatcctgaacgccgatgctaccaccgtgagcgttggctactatgagggcggtgtttacaataactattgggtgctgatcttctcttaccccgaaaattctcacaccgaggattaccgtcaggaagttctgaatctggtcaatgcccagcgcgcaaagtatggtctgactgctctgaaaatgggcgatgacgctttgactgccgccgcacagacccgtgccgaggagatctccgttgtgaactcccacgtccgtcccgatggttccaagtgcttcaccgtcctgaaggactacggcgtcaccgatacccccaccggcgagaatgccgcatggggtagcgtctctcctgaagaggtcgtcaacgcatggatgaactccgaaggccatcgcgccaatatcctgaaccctgaggctcgcaagatgagtgttggctactactacaacagcaacagcacctggggtcatcagtggattcagatctttaccaagtgatcaactgctttcttcttataaaagactgacggagccgcaaggcttcgtcagtctttttatttgcgcccgtttgtgttatacttattctgagttattatcaggaggatctaacgtggaggattaccgcaccgtccggggcacggccaccggcgaatatgaagaaaaaaaaagccgctttatcgcacagctctcctttgccgacagcgaggaagccgccgttgcctttctggagcaggtgcgggcggctaaccgcaccgcgcggcacaatgtctacgcttaccgcctgcgggcgggcaaccgcgagcgctattccgatgacggcgagccggccaagaccgccggtacgcccgcgctggaagtgttgcagcacagcggcctgacagacctgatcgtggtggtcacccgctactttggcggggtgctgctgggcaccggcggcttggtgcgcgcttacactaccgccactgcccgtgcgctggaaaacgccgaggtggtcactgtgcgcagcgtggtggaattacaagtgacagtggactacgccctttacgagcgtgcatctctgctcattgacgccgccggggcaaagcaggcaccgccggagtttacagaccgggtcaccctgcgctggcagatgccggagcataccgaagccccgctgctggagcagctgcgggaactgacccggggcagcgctcaggtaacggtgtctgacccgttctacgcaccattttaaaaaacaaagtcttttttgcaaaccgacacggaacttcccccttcgacacggccgatgtgctacaattgccgtagcgcagcaattgggatcggctgtgcgcagaggggaggggagaagcccgaaaaacaaaaggaggatctgtatggatgtgcgccggagaaccgaggagatcgaacacctcacctttgcaccgtgggcgaccttcagcgatgcaagccgcggcagagtcgtgccggagccgcaggacccgctgcgcccggtgttccagcgggatcgcgaccgggtgctgcactgcaaggccttccggcgtctcaagcagaaaacgcaggtgttcctctcgccggaaggtgacctgtaccgcacccggttgacccatacgctggaagtttcgcagatcgcccgcaccattgcccggggtctgcgcctgaacgaggatctgaccgaggccatcagccttgcgcatgatctggggcacactccctttggccacgcaggcgaaaaggcactgaacgacctttgcccggacggcttccaccactatatgcaaagcctgcgtgtggtggatcggctggaaaaggatggcgagggtctcaacctgacatgggaggtgcgcaacggcatcgttacccacaccaagggcacatgggcggctaccccggaagggcgcatcgtgcgtcttgcggatcagatcgcctttgtcaaccacgatatcgaggacgccgtgcgcgccggtgtgctggacgctgccaccctgcccaaggactgcacggcagtgctggggcagactaagtccgcccgcatcaccactatgatcaacagcatcctcacccacagcgagggggatgtccgcatgggcaccgaggaatacgaggcttttctcgctttgcgggatttcatgtacgccaccgtgtatgtggacaaaaacgccaagcacgaggagcagaaggtggacaagcttatcgcggaactgtacgagtactacctgacccatgtggatcagatgtccaacttttatgtgcagctggcctatcaggagggacgggaacgcgccgtcaccgactatatcagcggtatgagcgacgagtttgccatccgcacttttgaagaactgttcgtgccccagaaatggcacgtcctttaaaactggagaggtcgtttaaaacaacatgatcccacatgaatacatcgaggaacttacccgccgcaccgacatcgtggaactggtgggcagctatgtgcagctcaagcgcaagggacggctgtacggcggtctgtgcccctttcacagcgaaaaaacgccgtccttctatgtgtaccctgacacccaaagcttttactgcttcggctgtcaggcagccggagatgccatcagctttgtcaaaaagatcaacaatatcagcagcggcgaagctatcaagatgctggcttcccgcgccggtatgccggagccgcaggaggacgacaagaccggacgtctgcgcagccgggtgctttccatgaataaggaggccgcccgcttcttccacgcctgtctgaactctaccgtggaggaggcacggcaggcgcgcgcttactggcggcggcgcgggctggacgataagaccatcgtccggttcgggctgggctatgcccccaacgatgggcaggcactgtaccagtacctgcgggataagggctacaaccagcaggaactggacgccagcggcttgttcaaacgcagccagtccgggcgcatctactgcctgttctggaagcgtgtcatgacccctatctttgacctgcgcggcaacatcattgcctttggcgggcgcgtgatggacgactccaagcccaaatacgtcaacagcccggaaacgctggtctatcacaaatccgagacggtgtttgccatgcagatcgccaagcgcagcgcctcccggcggttcgtgctgtgcgagggctacatggatgtcatcagtatgcagcaggcgggcatcgacaccgccgtctgcgcctgcggcaccgccctgacccccgggcaggtgcgcatcatcagcgagtatgccgatgaggtcattctgagctatgactcggacgaggccggccagaaggcgaccttgcgctcgctggaactgttccgcaacagcccggtaaaggtgggcgttttgcagattcccggcgcaaaggacccggacgaatacatcaaaaaatacggcccggagcgttttcaggcacttctggacggggtgggcaatgcgttggacttccggctcaagcgcctgcgagaccagtatgatctctcgcaggatgcgcagcggctgcaatatgtaaaggaagccgtggagatgctggccgagcgctctaaccccactgagcaggaggtgtacgccgggcggctggcagaggagaccaacatctccaaaaccgccattctggcgcagctgggtaccgcagtaaagcgggcgggcggcaagtaccgccgggagaaaaaccgcgagctgctgcgctccggtgagatggatcagatcaaggttccgtacagcgcaggcggcagtcaggcgctgggcatcgccagcgcccagcagcggctgctggctgctattctgagggagcctcgttatctggaactggccaagcagcagctgacggcggagcaattcatccagccgcagcagaaggaactatacgaagcgatgctcaattgcagccgggagggtgtggaactcagcctgactgcactgcgggcatttgtaagtgaagaagcattgaatgaactgagccggcttgcggcacaatacagcgatgtgaactgcaccccggacgatatccgtctgtatctggacaggatcgcccggggaatgccggttgctagcaaagctgctgcaatgtccggcgatgagatcacacagtatcttcagtcgatgcgcgaaaaaaagcaggggacgctgcccgaacaagactgatccctgttttccctccggctggagctggagagaaaaggagcaggaatcatgcagaaattgtcgcaaacggaagaacttgcccgcagccttgccgcaaaggctcaccgtcacaccctgaccacggagcagatcagccgtgccatggaagaagcggattttgatattgcacagctggacgagctttacgcggcgctggagcagcggggcgttcatctggcagaggaggagcctgccgagctgcctgtgctggatgatgcccagatcggcaggctggagaatgaactatcctcggagggtgtggcactggatgatccggtcaagacctatttaaaggagatcggccgggtgccgctgctgaccgccggacaggagatggcgctggcaaaggctgcccgggccggggatgcagaggcccgccgcgctttgagcgaggcaaacctgcggctggtggtatcggtagccaagcgctacgccgggcgtggactgccttttctggatctcattcaggagggcaacctcggcctgatgaaggctgctgaaaagtttgagccggagcggggcttcaagttctccacctatgcaacctggtggatccgtcagtccatcacccgcgccattgcggatcaggggcgcaccatccgcatcccggtgcatctggtggagagcatcaaccgggtcaagaaaacggcaggcgacctgctgcacaaaaatgggcgggagcccaccgtggaggagatcgccgccgcactggatatggagccggacaaggtgcgggaactgttgcaactgtcgcaggaacccatcagtctggaaacgccggtgggggaggaagaggacgcccatctggaggactttattcaggacgaggacgccggtgtcccggtggacgaagccgggcgccagctgctgcggcgggaactgctgcacgtccttaaaagcctgacgccccgggaggagagggtcatcaccctgcgctttggtctggaggatggccgtgcccgcaccctggaagaactgggcaaggagttcaacgtgacccgggagcgggtgcgtcagatcgaagcaaaggcgctgcgcaagctgcgccaccccagccgcgcaaagctgctgcgggattatctggacgagtgagcattctatataataggacaaggccgctgcacggcgttccgtgcggcggtctcttctttttgcggcagggaagcggaaaagtaatacctccgggcgcaagagcaaagatagacaaattgcacaagggtattatgaacaggaacgtgcaaaataaaaaaatcaagtacttggaaaacaaacgactacacgctgccgggcgttcgaaaacaaaccgaaaaataaatttatttcggcaaaaaactgaaaaatggcttgacaacaggggttttggggtgtatactgcattagtatcacataatggactagtgcgtcaaaaaaggaactgtgatggctgccgcttgaggggtcaccccgaaaagtttgtgcaaaatgccggaaggttccgcaggacgcgggtcgaattatgtgtgtctgctcaaatttgacccgcgtatacgacatcccgtagaatataaaagtaaggagtggttgattttatgatgaaagtcaagcccgtaaagctcggcaaaaccgagcgcatgagcttctcccacatcgacgaagtcatcagtatgccgaacctgatcgaggtgcagaagaactcgtatcagtggttcctggatgaaggcctgaaggaggtcttccacgatatcggcaccattgaggactacaccggcaatctggcactgagctttgtggacttccggctggacaaggagccgaagtacagcatcaaggagtgcaaggaacgcgacgttacctatgcagcccccctgcgcgtcactgcccgtctgctgaacaaggagaccggcgaggtgaaggatcaggagatcttcatgggtgacttccccctgatgactgacgcaggcacctttgtcatcaacggtgccgagcgtgcaatcgtcagccagttggtccgctctcccggtgtgttctacggccatgcgaaggataaggtcggcaacgacctgtacagcgccaccatgaaccccaaccgcggtgcatggctggagtacgagaccgatgccgccaacgtgttctatgtccgtatcgataagaaccgtaagctgcccgtcaccgtgctgtgccgtgcactgggcctgtcctctaacgaggatatcctgaactacttcggcgaggacgagcgcattctggccacgctggaaaaggataccaccaagaaccgcgaggagggcctgctggaggtctaccgcaagctgcgccccggcgagccccccacggtggagtccgctaccagccagatcgatatgctgttcttcgatccgcgccggtacgacctgtcccgtttcggccgctataagatgaataagaagctgtctctggcacgccgcatcatggaccatgtggccgcagagaacgtggtggatcccttcaccggcgagatccttgtcgaggccgacaagaagatcgaccgcaagctggccgagcagatcgatgctgccggcgtgaatctggtcgtgctgaagatcgatgatcccatgaaggatcagccccacaaggtcaaggtcatcaccaacggctgcgtggacgcacaggccatcatcgacagctactaccccgcattcaagggtgtggatgtcaaggagtgcggcatcaacgagcgttgctgcctcaaggagctgcgcaagatccttgataacgcctccagcgccgaggaggtcatggagagcctgaagaaggatcacgacctgctcatcggccgtaccgtcaccatcgacgatatcctgtcctccatcaactacctgaacggtctgggctacggcatcggcaccaccgatgatatcgaccatctgggcaaccgacgtatccgcagcgtgggcgagctgctgcagaaccagttccgcatcggtttctcccgtatggagcgcgtcatccgtgagcgtatgaccctgcagagtcaggatcagagcgtcatcactccgcaggcactgatcaacatccgtcctgtggtggcagccatcaaggagttcttcggctcctctccgctgtctcagttcatggatcagaataaccctctggctgagctgacccacaagcgccgtctgtctgctctgggccccggcggtctgagccgtgaccgcgcaggcttcgaagtccgcgacgttcattacagccactatggccgtatgtgccccattgagacccctgaaggccccaacatcggtctgatctcctatctggcatcctacgccaagatcaacgagtacggcttcgtggaggctccctaccgcaaggtcaagaagatctacgacgagaacaacaatctcatcgagcaggtcgtcaccgacgaggtggagtatatgaccgccgatgtggaggacgagtacgttgtggcacaggccaacgagccgctggatgaaggcaagcacttcatccgtccccgtgtgtctgcccgccgccgcgacgagatcttggaaatcgacgcagagaaggtcgattacatggacgtttctccgcgaatgatggtctctgttgctaccgcttgcatccccttcctggagaacgatgactgtaaccgtgcactgatgggctctaacatgcagcgtcaggcagtgcctctgatggtcacccagcagcccattgttgctactggtatggagtacaaggctgctaccgattccggcactgctgtgctggccaagagcaacggcgttgtggaaaaggtcgatgccgaccatgttgtggtgcgcaacgagcagggcgctctggaggattattctctgatcaagtttgcccgctccaacgcaggcacctgcatcaaccagcgccccatcgtagaagtgggcgagaccgtcaccgccggtcaggtgctggccgatggccccgcaatgcgcaacggcgagatctctctgggtaagaacgccctgatcggcttcatgacctgggagggctacaactacgaggacgccgtcctgctgaacgagaagatcgtgcgtgaggacgtgtacacctccatccacatcgaggagtacgagaccgagagccgcgataccaagctgggacccgaagagatcacccgcgacatccccaacgtttctgaggacgccctgaaagatctggacgagcgcggcatcatccgcattggtgccgaggtcaagagcggcgatattctggtcggtaaggtcaccccgaagggcgagactgagctgaccgctgaggagcgcctgctgcgcgccatcttcggcgagaaggcccgcgaggtgcgcgacacctctctgcgtgtgcctcacggcgcatacggcatcattgtggatgtcaaggtttttactccggagaacagcgatgagctgcagcccggtgtgcgcgaggtcgtccgctgctatatcgcccagaagcgtaagatcagcgtcggcgataagatggcaggccgtcacggtaacaagggtgtcgtttcccgcatcctgccgcaggaggatatgccctacctgcccgacggcactccgctggatatcgtgctgaacccgctgggcgtgccttcccgtatgaatatcggtcaggtgctggaagtcaaccttggctacgctgccaaggcctgcggcatcaaggtcatgacccctgtctttgactctgcccgtgagaacgacatcggcgatacctttgataccgcccgcgagatgtggcacggtgagaatgcacctgcataccccaccaagctccccaagatcatgggcgagaagggccacatcatcgacttctccaagatcgagctggatcgtgacggcaagaccaccgtttacgatggccgtaccggtgaaaagtttgataaccgcgttaccgttggttatatgtactacctcaagctgcatcacctggtcgacgataagatccacgcccgttccaccggcccctactctctggtcactcagcagcctctgggcggcaaggctcagttcggcggtcagcgcttcggcgagatggaggtctgggcactggaagcttacggcgccgcttacaccctgcaggagatcctgactgtcaagtccgatgatgtggagggtcgtgtcaagacctacgaagccatcgtcaagggcgagcccatcccgcagcccggcatccccgagtccttccgcgttatgctgaaggaactgcagtctctgggtatggacgtgatcgtgcaggataaggacggcaacgagatcgatatgcgccagaacttcgacgatgaagagaccggctttgatatgcgtgacgttgccggtaccgagactgtggtgcaggagagcgaactgactgattacaacatcaaggacgccgatgcaggtttcgatgatccttctgtgctggaggacgataactccggtgccgaggctccggctgcttctgacgaagtagatttctgatctggatacacaacacagccttcccccttggccgcgtgctgcggcaggggagaagcgcctgtgatcccgtaacagaaaagccgcctgtatcatcgaaacaactagagattaagaaagggttcgtttcatggaaaacaacgttttcgattccattaaaatcggccttgcctccccggagcagatccgcgcttggagctacggcgaggtcaaaaagcccgaaaccatcaactaccgcaccctgaagccggagcgtgacggcctgtactgcgagcgcatttttggacctaccaaggactgggagtgccactgcggcaagtacaagcgcatccgttataagggcaaggtgtgtgatcgctgcggcgtcgaggtcaccaaggccaaggttcgccgtgagcgtatgggtcacattgagctggctgctcctgtgagccacatctggtacttcaagggcatccccagccgcatcggcctgatgctggacatcagcccccgcctgctggaaaaggtgctgtactttgcaagctatatcgtcaccgatcccggtctgaccccgctggataagaagcagctgctgaccgagaaggaataccgcgaaatgcgcgatcgttacggcgacgagttcgaggctgccatgggcgccgaggctgtccagaccctgctgaaggagatcgatctggatcagctgagcgctgagctgaccgccgaggtggaaaagtcctccggccagaagcgcgtgcgcatcctcaagcgtctggaggttgttgaggctttccgcatctccggcaaccgtcccgagtggatgatcatggatgtgctgcccgtgctgccgcctgacctgcgccccatggttcagctggacggcggccgctttgccacctccgacctgaacgacctgtaccgccgcgtcatcaaccgcaacaaccgtctgcgccgcctgctggagctgggcgctcctgacatcatcgtgcgcaacgagaagcggatgctgcaggaggctgtggacagcctgatcgacaacggccgccgcggccgtccggtcaccggccccaacaaccgcgcactgaagagcctttctgatctgctgaagggcaagcagggccgcttccgtcagaacctgctgggcaagcgtgttgactactccggccgttccgttatcgtcgtcggtcctgagctgaagatggatcagtgcggtctgcccaaggagatggctctggagctgttcaagccctttgtcatgaaggatctggtggagaagggcattgccaacaacatcaagtccgcccgcaagatggtcgagcgcgcaaagcccgaggtctgggacagcctcgagaccgtcatcaagggtcaccccgtgctgctgaaccgtgcacctaccctgcaccgtctgggcattcaggccttcaaccccgtgctggtggaaggccgtgccgtcaagctgcacccgctggcctgtaccgcattcaacgccgacttcgacggcgaccagatggcagtccatctgcctctgagtgaggatgcctgccgtgaagccaagatgctgatgctggcttccggcaacctgctgaaaccctctgacggcgcacctgttaccgtgcctacgcaggatatgatcctgggcagctactacctgaccaccgtccgcgagaacgacgagggcgcaggcaaggtgttccgtgatgagaacgaggttctgatggcttacgccgagcacgtcatcaccctgcacgcgcccatcaaggtgcgccgcaccatgaccattgacggcgtggagcgcaccggtctggtggatgccaccgccggccgcatcatcttcaacaatcccattccccagaacctgggctatgtggatcgtaccgatcccgagcactggctggagtacgaggtcagcttccgcgtgaccaaaaagaccctgcccgagatcatctcccgctgcatgacccgcaacggcacccgcaagtgtgccaagatgctggatgccatcaaggcacagggctataagtactccaccctgtccgctatctccgtggctgtgtgcgacgctgtgatcccgccccagaagcaggaactgatcgccgaggccgataaggagatcgccaaggtcggcaagctgttcaaccgtggtctgatctcggataacgagcgttacaacaagaccatcgatatctggcagaagaccaccgataaggtctctaaggctctggcagacaacctgcccaaggacaacgagatctatatgatggcagactccggtgctcgtggttctatgaaccagatcaagcagctggctggtatgcgcggcctgctggcaaacactgccggtcacaccatcgagatgcccattcgtgcaaactaccgcgaaggtctgaacattctggaatatttcgtttctgcccgtggtgctcgtaagggtctggctgataccgctctgcgtactgccgactccggttacctgacccgccgcatggtcgacgtttctcaggacgtcatcgtccgcgagatcgactgcggcaccaccgatggcctgtgggtctctgagatccacgagggcaaggagaagatcgagagcttccgtgagcgtctgatcggccgttttgccgtgggcgatgtggtcaaccccatcaccggcaaggttatcgtgcccgagggcaagatgatcgacctgtatgacgccaacgagatcgaggcagccggtatcacccgtctgaaaatccgcagcctgctgacctgccgtgcaaagaccggcgtctgcgcacgctgctacggttccgatatggccaacggcgagccggtccgtctgggcgagtctgtcggtgttatcgccgcagagtccatcggcgagcccggtactcagctgaccatgcgtactttccataccggcggtatcgcatctgccgaggatattacacagggtctgccccgtgttgaggagctgttcgagagccgccgtcccaagagcatggccatcatgagcgagatctctggtgtggtctctcaggacgacaccaagaagaacgtggtcatcaaggtcaccggcaaggacgagaacggtgctgaggaagtcaagagctactccatcccgttcactcagcattcccgcgtgatgcccggcgaccgcgtggagaagggcgacatcatcacccgtgagggcgtgctgtacccgcaggatattctggccatcaagggtctggaggacgtgcagaactacctgatcaacgaggtccagaaggtctaccgtctgcagggcgttgagatcaacgataagcatatcgaagtcatcgtccgtcagatgtgccgcaaggtgcgagtgaccgactccggctcctccaacctgatcggcggtgctctggcaagccgtctggaggtggagaacatcaatgccgatctgcagaagcgcattgatgcaggcgaagagggtctgaagctggtggagtaccagcaggtgctgctgggcatcaccaaggctgctctggccaacgactccttcctgtccgctgcatccttccaggagaccacccgcgtgttgaccgaggccgccatcaagggtaaggtcgacccgctgtccggtctgaaggagaacgtcatcatcggtaagctgatccccgccggtaccggtctgccggaggtgcgtgaggatctgaagaaccgtgaggctgagcgcgatgccgagatcgcagccgagctggctgcctccgcacagtaagcgcagcatccgtcaggatctgatccgttaaacaaagccgctccgcgggcgaaagcctgcggagcggcttttgcgtgcataaagcagcgcagcaggggagggaaaatgcatttattctgccaaaaactgtctgaaagaaaaaatctggaataaatacaaaaaaatttgcaaaaactgttgacatccggccgcaaagcgggtattatataactgttgcgcgtccctcatggggatagtgcggcaaaaaagtcggaaaatcttccgatgttcatcattaagaaaggagaaacaaaatgcctacttttaaccagcttgtacgcaaaggccgtgaggtcctgactaccaagagcaccgctcccgctctgcagaagacttataactctcagaagaagcagtactctgatctgagcagcccccagaagcgtggtgtctgcactgcagttcgtaccatgacccccaagaagcctaactctgctctgcgtaaggttgctcgtgtccgcctcacgaatggtatcgaggtcacctcttacattcccggtatcggccataacctgcaggagcactccgtcgtgctgatccgtggcggccgtgttaaggacctgcccggtgtgcgttaccacatcatccgtggtaccctggatactcagggtgtggcaggccgtaaccaggcccgctccaagtacggcgcaaagcgtcctaaggccggtgctgcaaagaagtaattgaggacaaccgccataaacggctttcctttatataaataacaagtccgcttaaaagcggagggtaacggtttatgtaaggtcagctctttgtgacacaacgggagttttattactttcgagtaccgatgatatcattctgtgaaggagggaagaaagatgcctagaagaggtaacattgctaagcgcgatgtcttagctgatcctatttacaattccaagatggtcacccgcctggtcaacagcgtcatgctggatggcaagaagggcgtcgctcagaagatcgtttacgaagctttctccatgattcaggaaaagaccggcaacgatcctctggagactttcgagaaggcgatggagaacatcatgcccagcctcgagtgcaagacccgccgtgttggtggcgctaactaccaggttcccctggaggtcagccccgctcgccgcgagactctgggtctgcgctggttgactgcctacagccgcacccgtggtgagaagaccatggcacagcgtctggctgctgagatcatggatgctgccaacaacactggtaacgccgtgaagaagcgtgaggacactcacaagatggcagaagctaacaaggctttcgcacatttccgttattgatctgttctgtaggaggttaatttcatggctacacccagagaagtttctcttcagatgacgagaaatatcggcattatggctcatatcgatgccggcaagacgaccactaccgagcgtatcctgtactacaccggtatcaaccataagatcggtgaggtccacgatggcggtgccacgatggactggatggttcaggagcaggagcgtggtatcaccatcacttccgctgctaccacctgctactggtctcactctgagacccagaaggatccggtcgcgttcaagaagaatcgtcaccgcatcaacattatcgacactccgggccacgttgacttcactgttgaggttcagcgttctctgcgtgttctggacggttctgtgaccgttctggccgcaaagggtggtgtcgagcctcagtctgagaccgtttggcgtcaggctgatgaatacaaagtcccccgtatggtgtacgtcaacaagatggacaccatgggtgctgacttcttccgctgcatcaagatgctgcatgatcgtctgcacgccaacggcgtggccatccagctgcccatcggtcaggaggataccttccgcggtatcgttgacctggtcgatatgaacgctgaggtctactacgacgacatgggcaacgatatgcgtaccgagcccatccccgaggatatggtcgagcaggctgaagagtaccgtaacattctggtcgaggctgttgccgagaacgacgaagagttgatggagaagtaccttgagggcgaggaaatcacccgcgaggaactgaagaaggctatccgcaaggaaaccattgcaaatactctggttcccgttgtctgcggctcttcctacaagaaccgcggtgtgcagaagctgctggacgctatcgttgactatatgcccgctcctaccgatgttgaggacatcaagggtgtgaatcctgagaccgaagagcaggagacccgtccgtcttccgatgacgctcccttcgcagctttggctttcaagatcgctaccgacccgttcgttggtaagctggcatacttccgtgtgtactccggtaaggttgaggcaggtactactgtttacaactctgtgaaggacagcaaggagcgtatgggccgcatcctgcagatgcactccaaccaccgcaaggatatcgactgctgctatgcaggtgatattgctgctgttgtcggtctgaagaacaccaccactggtgatactctgtgtgatgagaatcatcccatcattctggagtccatgaagttccccgagcccgttatccgcgttgctatcgagcctaagaccaaggctggcaacgagaagatgggcatcgcgctggcaaagctggccgaagaggatccgaccttcaagacctacaccgatgaagagaccggccagaccattattgctggtatgggcgagctgcacctggagatcatcgttgaccgtctgctgcgcgagttcaaggttgaggcaaacgtgggcgcaccccaggttgcttaccgtgagaccatccgcaaggaggccaaccaggagaccaagtacgcacgtcagtccggtggtaagggccagtacggtcacgttaagatcaagatcgagcccaacgagcccggcaagggttacgagttcgtcaacgctatcgttggcggcgctatcccgaaggaatacatccctgctatcgacaacggtattcagggtgctatgaaggctggcgttctggcaggctatcctgttgttgatgtcaaggtcaccctgtgggatggttcttatcatgaggtcgactcctctgaaatggccttctccatcgctggttctatggcattcaaggatgctatgcgcaaggctgatcctatcatcaccgagcccatcatgaaggttgctgttatcgttcccgatgagtatctgggcgatgttatcggtgacctgaacgctcgccgtggtcagatccagggcatggaggctatggccggtacccagcgtgtcaacgcatttgtgcctctggctcagatgttcggctacgctaccgacctgcgttccaagactcagggtcgtggccagtatgttatggagccctctcactacgagccggttcccaagaacattgctgaccagatcattgctggccgtaccaagggctaagcgctgaaaagcataagaattttgccggggtagtgtaactccggcaaaatttcctgtaaaagcacttgattttacagggcaaatttagtagaatagccttgcagtgcaatgtctgcattttgcagggttgttgtaaccaatatcaaaacctaaattaagggaggatattccaatggctgaaaaggcaaagttcgaccgttctaagccgcatgttaacatcggcaccatcggtcacgttgaccacggcaagaccactctgaccgctgctatcaccaagtacctggctctgaagggtgatgcagagttcatggactacgctaacatcgataaggctcctgaggagcgcgctcgtggtatcacgatcaactccgctcacgttgagtatcagaccgagaagcgtcactacgctcacgttgactgcccgggccatgctgactacgttaagaacatgatcaccggtgctgctcagatggacggcgctattctggttgttgctgctaccgatggtcccatgccccagacccgtgagcacatcctgctggctcgtcaggtcggcgtgccctatatcgttgtgttcatgaacaagtgcgatatggtcgatgacgaagagctgctggatctggtcgagatggagatccgtgagctgctgagcgagtacgacttcccgggcgacgacaccccgatcattcgtggttccgctctgaaggctctggaggctcccaacgatcccgaggatcccgcttacgcttgcatcaaggagctgatggatgctgttgattcctacatccccaacccggatcgtgaggaggacaagcccttcctgatgcccatcgaggatgtcatgaccatttctggccgtggtaccgttgctaccggtcgtgttgagcgtggtatggccaaggttggcgatgctatggagatcgtcggcatcaagcccgaccgtctgaacaccaccatcaccggtctggagatgttccgtaagtctctggacttcgctgaggctggcgataacatcggcgctctgctgcgtggtgttgatcgttcccagatcgagcgtggccaggttctggctaagcccggttctgtgcacccccacaacgtctttgaggctcaggtctacgtcctgaccaaggacgaaggcggccgtcacactcccttcttctccaactatcgtcctcagttctacttccgtaccactgacgtgaccggcatcatcaccctgcccgaaggcaccgagatgtgcatgcccggcgataacgtcatgatgcacgttgagctgctgacccctgttgctatggaagagggcctgcgtttcgctatccgcgagggtggccgtaccgttggttccggcgttgttggcaagatcattgagtgattttgtccttgaacgtaagttccaaggctaattagcaatttataaagaccttcccgttccggagagcgggaaggtctttttgtttgtttatggcagctgcaaacggctttgtttcacagctcctttaccgggtcagggtgttatagcagtctgcaaaggcgtgcagaaaggcggtcgcttcctcttctgtggtaagtggctcaggctgatgcgccaagaggaaagggcgttgcgccggtcttgactgactgcaagcactgcgcgggaaggcaacccatcggacgaacaggcggatttgaccgagacgcataccccgcgtgtgtccagctcccgctggaacacggtaccctttacgccctgcacgctcaggttcaggatatgcggcacagcgtttgccgggctgttgatgcgtacttttggatagcgggaaagctctgcacgcagccggtcattcaggctgcgcacagttgcggcgcgggctggcagctccgcagtagccttttccaaagccagcgccagcgagcaggcaagggctacggtaggtgtgccgctgcggtagggggtagtgctctctccgccgtggatgaggggcggcagtgccagccccagccgctttaccagcacaccgatgccgttgagcccgtaaaacttatgtgctgtcaggctcatggtgtccatgccctcaaactgcacaggaattttccccacagcctgcgtggcgtccacatggaaatggcagttggggtatgcctttaaaagctctgcaatctctgcaatgggctgtactacacccaactcgctgtccacagcggtcacagcaaccagaacggtgtccgggcgcagccgctttttcaggtctgcaaggtctactgtgccgtccggcaggatgtccagcagctccacctcgtacccctgcttttgcagcgcctccagactgccgctgacagatgaatgctccagcggggtagagaggatgtgcctgcctgctgcacctcccagcgctgccaacccctttacggcaaggttgttggcttcgcttgcaccggaggtgtagatgatgcccgcaggcggtgcacccagacagcgggcaatgctgcgggtcgcctcgtttatagcagcctttgcggtagcgcctgcctgatggtgggcattggcattgcccgggtagcgccgctcagcttcgcagaagcattgcagcacctcctcgtccacaggggtgttggcagagtaatccagatagagcatagagcctcctgtaatatcaacacattataatggtaggaaataagaacaggctctattataggcgattccgccccaaagcgcaacccccgcagtccgcagcgcggtgtgacaggtaagaaaaagctgtcaacaccttgctggaaagcccaaaatctgctatacttatcaaaaaggccgcagcgttgctgctgccttgccggagcggttccggttgttggaaagaacacaaaaagaaggggaggagcacaatgttcaagcgcgagcgactgcatagctgcttctttcccatttttgtgtggaggtcttgttcctgaaattcagaggcactgctgtttcaacggcaatgcctctttttttgggaataacagtataggaggttttctatgagcgaaaagatcgattactccaagggcgtatacgacgccaaaaagctgggcaccggcagaatgtttattctgggtgtgcagcacatgtttgccatgttcggtgcaacggttctggtgccgctgctcaccggcctgagcgtttccaccactctgctgtgtgccggtctgggcacgctgctgttccacctcattaccaaaaagaaggtcccggcattcctcggctcctcctttgcgtatctgggcggcttctccatcgtggctcccatgctggctgatgccgatggcaacttgaccgttgccaacactaagatgctgccgtatgcctgcgctgccattgcattctcgggtttggtctatctggtggccagcctgctgatctccacctttggcatccgccgcatcatgaagttcttcccgccggtggtcaccggccccatcattatctccatcggtctgatccttgctccctctgctatcaccaactgccagtccaactggctgctggcctttgtggcactgggcactgtcatcgtgtgcaacatctggggcaagggtatggtcaagatcctgcccattctcatcggtgtgctggtctcctacgctgtggcactggtcaccggcgcagtggacttccagaagatctccgaggccgcttggctgggcatccccctgcacaaggaggctatgggactgttcgccattgacggcagcccggagttcatcagcgctctgttcaccattatccccatcgcactggctaccatgatggagcacgttggcgatattgccgctatcagcgctactgtcggccacaactacatcaatgaccccggcctgaaccgcaccctgatgggcgatggtctggccaccaccatggctggtctgctgggcggccccgccaacaccacctacggcgagaacaccggcgtgctggcactgagcaagatctacgacccgctggtcatccgcattgccgctgtgctggctatcatcctgagcttcagccccaagtttgaggctgtcatcaacaccatccccaccggcatcatcggcggtatcagctttgtgctgtacggaatgatctccgctatcggtgtgcgcaacgtggtggagaaccgcgtggacttcaccaacagccgcaacctgatcgttgccgccgtcattctggtgtgcgcactgggcttcaactctgtgggcggcgttggctttaccgttggcagtgtcaccatcaacctgtccggtctggctgtggctgcgattgcaggtatcctgctcaacgctatcctgcccggcaacgactacgagtttgacgctaccgccggttctgatgctgctaccagcggcaacctgcaggtctgatcctcaggaatacgtccagttttctgtaagggaatttgggcatcctgccagattttaataaataggaataattcttaaaaatatacttgactaactaggaattattcgctataatagagccatggaaagggaagtacgcaaagcccccttccatggctctttctatacccggcagcgcggctgcccagcatagaagcaacaggcgggtggtttccgtcctgtatcatttttaacagatcgaatggaggtaaattcttatgaagaaatacgtttgcaccgtttgtggttatatcgctgagggtgagatccccgctcagtgccccgtttgcaaggctcccgcttccgcttttgtggaaaagaccggcaacacctacgtcaccgagcatgttgttggcatcggcaaggcagagggcgtgccgcaggagatcgttgatggtctgcgcgcaaacttcgagggcgagtgcagtgaggtcggtatgtatctggctatggctcgcgtggcagagcgtgagggctaccccgagatcgccgaggcctacaagcgctatgcttacgaagaggctgaccacgcatcccgctttgcagagctgctgggcgaggtcgtgaccgacagcaccaagaagaacctgatgatgcgtgccgaggccgagtgcggtgcctgcgccggtaagatggacctggccaagaaggctaaggcactgaatctggacgctatccacgataccgtccatgagatggcaaaggatgaagcccgtcacggccgcggcttcgagggcctgctgaagcgttacttcaacaccgaagtctgataagggttccccggttatctattctgcccgctgcaaggacattccgccttgcagcgggctttttgcgttctaattgcggcaacggctttttgggaaaaatggagcaccggagcgtccgcagacgctccggtgctctaaaataaaaaagaatctttcctctgaagatgcgcaaagcgaacgcggcgcgaattcaaaatcgtcccgccacaaaaaaggcagctacgcagattttcgcgcagttgcctcttgcattttgtgatggctgaaccttactggataccggtaacagggtaatcctgtgcctctacggccttcttcagcacttcatcatccacctctgcgttcagggtaacgatggcagtaccagcttcgtggctgacaacagcctcgtccacctgcggcagagcctccaaagccttcttgacgcgggcttcacagtgggggcacatcatgccttctacggtcagggtctttttcatagtggtctcctccttttgagttgtatcttcctccgctgcgggctgcacaagggcagcgggcagggcagggacatgtttgggcgggtggtcacgctttgcgctgtgcaggtcaaacaagttcagtcgcaaggcgttgctcaccacgcagaagctggaaaggctcatggcagctgcgccgaacatggggttcagcgtcagccccaaggggatgaacacaccggctgccagcggaatgccgatgatgttatagataaacgcccagaacaggttttcgtggatgttgcgcagggaagcgcggctcagccggatggcggcaggcacgtccgaaagcttggaattcatcagtactacgtctgcggcgtcaatggctacgtccgtgcctgcaccgatggcaatgccggtgtcagcgcgggtcagggcaggggcatcgttgatgccgtcgcccaccatggctaccttgccgtacttctgcagctgccggataacggcctccttgccctccggcagcaccccggcgatcacctcgtccaccccggcctgtcggccgatggcctcggcggtgcgctgattgtcgccggtcagcatcaccacgcggatgcccatattccgcagctcccggatggcctgcgggctatcctccttgatggtatcagctaccgcgataacgcccagcagacgacctgcgccgccaaagaacaggggcgtcttaccctgcgcagccagtgcggcagactgcgtttgcagcgcagcagggatagcgacctttgtgctaataaatgcagcgctgccgccaaagatctccttgccctccagcttggcggtaaggccgttgcccggcagggcggtaaaatcggtaacagagggcagctccagctgcttttcctccgcataggccagcactgcccgcgccagtgggtgctcactgcggccctccagcgcggctgccagcgtgagcagctcggtctcggtcacgcccacagcgggcagaaggtcggtgacggtaggctcgccgcaggtgatagtgccggtcttgtccagcgccacgatgcgggtacgcccggcttcttctaacgccgcagcggtcttgaataggatgccgttttttgcgcccaggccgttgcctaccataatagctaccggcgttgccagacccagcgcacaggggcagctgatgaccagcaccgagatgccccgcgccagcgcgtagccgacgtcccgccccagcagcagccaaacaagggtggtgaccactgcaatgctgatgaccgcaggcacgaaaaagccggatacggtatctgcgatctttgcaatgggtgccttggtagcagcggcatcgctgaccatgcggatgatctgcgccagcgtggtgtcctcgcccacgcgggtagcacggcactgcagatagccggactgattggtggtggcggcgcttaccttatcgccaacggccttgtctaccgggatgctctcgccggtcagggcgctctcgttcacggcactgctgccctccagcacaatgccgtccaccgggatgttctcgcccgggcgcaccacaaagatgtcctccttctgtacctgctcaatgggtacggtcacctcggtgccgtcccgcagcagggtagcggtcttgggggcaagcttcatcaggcttttgagcgcatcggtggtcttgcccttggagcgcgcctccagcatcttgcccacggtgataagggtcaaaatcatggcggcagactcaaaatagaactccatcatgtagtgcatgacaagttcttcgttgccgtgcagctgcgcatcggtcatggcaaacagggcgtaggtgctccacacaaagcttgccatcgagcccatagccaccagcgtatccatgttgggggagcggtgtaccagccctttgaagccattgatgaaaaatttctggttgatcaccatcacgatgcctgccagcaacagctgtaccagtcccatggcaatgtggttgccgtcaaaccagcggggcagcggccagccccacatcatgtgccccatggaaaagtacatcagcaccagcaaaaagcccagcgaggcgatgagccgccgtttcagcttgggcgtttcgtggtctgctagagcatccagctctgcgctggtgctggccgctgcggcggcttttttggggcttgcgccgtaaccggcctgctctacggcacggataatggcagcatcctcagcggtgccttctacgcccatggagttggtcagcaggcttaccgaacagccggtgacgcccggcacgctctttacggccttttctacccgggcagagcaggccgcgcagctcatgccggtaacgttgaattgttccattgttgtttctccttgtggtcagtctgcccggcgggcggtcatttcatcagcttgggcagcagccggagcagttcctccagcttttcgtcactgccggcacgcaggtcatccgccacgcagctgccgatgtgctgtgccagcaattcccgggaaaagctgttcagcgccgcattggctgcggctacctgtaccagaatgtccacacagtaggcgtccttttccaacatcccgcggatgccgcgcacctgcccttcaatacggttcagccggttgagcagagctttgtgttcctccgggctgcgcactttgtggcggcagcagcaggggacagcagtatctgacgcagtgtctacttccggtgcatcatcgcagcagcaacaacgctttttgctctcttccatattggaatcgctcccttcataaacccctatggggtatattttcttgcaacagcagtatagcacataatatccgacaattcaagtaggaaatgaaatataaatagtacagctgacaaaaaatggttcggaaacgccgcaggcgtttctgaaccataaattaaaagatgaaattccgctgaacatggccggagcgcacgcgagggtcattcaaaaccgttgtacataagaaaacgagggaagcccgcaggctttccctcgttgtaagctcttactttacttccagaatgcgcggtgcaaacaggctccacatcttgccccaccagtaccagtcgtgggatacgtcgccgccccagatctccagatgtgcgggcataccctgatccttcagcagatcggccagtgcctgcgtgtcgtccagtgcatcgccctcgtaggcaccctgaccggcacagaggatcaggctgttctcctcagccttggtcagcgcaggcttgttggcaatgccgttctcctgcaaataggcaaggggagcgcagcgcagcaccatgtcatcgctgtcagtgccccagaaacgggtcaggtcgtagatgccgcccatgcccacagcacctgcaaacagggtgggacggcgcagacggcagtggacggcgtggtaagcgcccaagtctacaccggcagtccagatccgggtgccctttttggcgttgttcagggtcagaatacggggagcaagctcagcggtcaggtagacgaaatacttctcctgcagctcggcgcggcggcgctggggcagatcaccgttcaaaaggccctcgccgtccatggcatctgcgcagaacagctgcaccttgccctcgttcagcagctgggcaatggcatcgggcatcccgttgttctcccagtcataaaaacggccgccgcgggcgggcagtgccagcaccggcacaccggcatggccgtacaccttaaactccatctcacggccaagaaccgtgctccactctttgtaataggtaccctggatcataaatcaagcactccttattttatcattcaccggcccgggcacagtcgctgcgcaccggtgccggatttggaagctataatcagacaaactggttgcgctgcgggtcgtaatcgtagcccacagtgtgcagttttgcgcacagaccggccttgtcggcctccagatcttcgcacagcgcatcgagatccttatactgatcccgcagtttcaggttcaccacgctcagcagcatgatgggatcaacaggcaaagacattttattcctctccttgcggcaaataaaaaagccggccactcgacaaagtgaccggccacatacaccaaattagacagcgcgggtaactttgccagcgcgcaggcaacgggagcatgcgtagacatacttgggagagccctccacgaccgccttgacacgacggacattcggcttccaggtacggttggaacggcgatgagagtgagagaccttgataccaaaggtaacacccttgccgcagcattcacacttagccatggtaattgcacctcctacagtgaagtatggaatcaaaataatcagcttgactattttaccagagatacaaagaaaaagcaagtctttttttaaattttctgtagctttttgcattcccggtgctgtggggcttgtgcagggcacaaaaaaatagtattataaaggaagaaattcgttttgacaggagatttacatgaccgcacaggcaacctattatatcatccgcgcactggtggcactggtggccatcccgttccacgaggctggccatgcgctggcagcatggctgctgggcgatgccaccgccaaacgcgaggggcgtctttcgctgaatccctttgcgcattttgacctgctgggcaccctgtgcatggtgtttgcaggcgtgggctgggcaaagcctgtgtccaccaacccccgcaacttcaaaaaccctaagtggggcatggcgcttacggcactggcaggccctgtggcaaaccttgtgctggcttaccttggcatggtggcatggaaggtaatgtactactgggcaccggtcaataacgctaccatttacattgccatgttcctgcgctatctggtgctgatgaacgtcagccttgcggtgttcaacctgattccggtgccgccgctggacggcagccgcattctgctggtggtgctgccgcagcgcatctactttggcctgatgcggtacgaaaaatatatcatgatcgtcatgctggcagcggtttggggcggctttctggatacgccgctctactacctgaacaacgtagtgtggtcgcttttgggcgcaggcaccgggtatattgataagatcgcctacgccgtttatgccagcagccttggggcggtgatctgagtggcagaggaattgaccttccatctggaagattttgacggcccgctggaattattgctggctctggtggccaaacataaaatggacttgcataatatccccatcctgcagctgatcgaccagtacacccgcaccgtggagcaggccgaccccgatcccgagaccgccagcgccttcattgagatggcggcgcatctggtggaaatgaaaagctttctgttgctgccccgcagcgaagagggtgagcgcatgaaacaggagctcaccggccagctcatcgagtacgaccagtgccgccgcatggcggctctgctgcgcgcaaaaggggaggctgccccggtattcgtgcgccgccccatggaagtggagtgggataacacctacgcattgcaccatgccccgcagattttggcggactactggcaggcgttggcaggccgcaccaagacccgccgtgtgcccacccagcagcagtttgagccgctggtcaccgcgcccatggtatcggtcaccagccgggtggtgtacatcctgcgccggatgctgggcggcaccgtggcaaaaatggagcaattgttttcccgcagccagagccgcagcaccaacgtagctacctttctggcgctgctggaactggtgcgcggcggacgcatcgcgttggacgaccggggagcgctgaccatgcgccgcacccgcccggaacgcaataaggagaacccatgaaccagaaacaaacccttgccgccgtggaggctatgctttttgcctgcggcgaccccataggtgccgataagctggcacaggcggtgcagctgccccagtccagcgtggatgccgcactggagaccctgcacacccgctatcagcgggaagacagcggcctgtgtctgctgcatctgaatacccggtggcagctggctaccaagactcagtgggcagactgtgtgcgccgcgtgctggacagccgccgcgccgtaccgcttggccctgcggccatggagaccctgaccgtcatcgcctacaaccagccggtgtcccgcgcctttattgagcaggtgcgcggcgtggattcctcctccagcgtgtccggtctgctggaaaaggggctcatcgaggaagccggacgtctggatctgccgggtcgtccggtcagcttccgcaccaccgatacatttttgcgtgtgttcggactgtccagtctggcagacctgccgccggtgcatagcgacgcaccggcagatgatccgaccgaaagtgagggctgatccatgggcatggttctttccgcagtgggcgcttgtctgctgttcgtcctcaaggcggtgggcatcctgctgctgattattctggtgctggcggcgctgttgctgctgtgccccttctgcgcggatgtctgctggcaaaacgatacgcttaccgtaaaggccggggcactgggcatcacttttccggtgttccaatacccaaagccggaacctcccgcccagccggaggagcccaagggctttaccagcaggctgaaaacaaaattccgcgcatggcgtgcggagcgcaagcgcaaaaaggctgaaaaaaaggctgcgcagcccgcaaagcccaaaactgaaaagccgccccgccaaaaggcaaagatcacgctggatgtgatctgcaccatgctacggggcgtgggtacgctgctgcgggcggtgtttggcgtgctccgttttacaaagatctcggtctgccttggcgtgcgcggggacgaccccgccgcggctgcccgcaattacggcaagctgcaagcgtggctttacccgacccttggcgtgctggaccactttctctttctggaatttgaccagctgcgcgttctgccggacttcggcagcgcccagcctactgtgccggacaaggtgtccttccgtgtcagcgcacaggcgctgttcatcgtcattgccgctgtgcgggtactgtacgagttctggcgcaaaaaagtattggacatctttatataaagtgtggtacactaaatctatctcagaatgctttccggcggcctgctgcctgcacggatgaataaaggagagttgttttatggcagagcatcctattcagggtctgatgaacgttacgatggagaaaattcaccagatggtggactccaacaccattatcggcaagcccatcaccaccgaggatggcatcaccatcctgccggtgtccaaggtgagttttggttttgcctctggcggtaccgattttaacggcaagaacgctgccaacaaggatctgtttggcggcggctccggtgccggtgtcaacattcagccggtggcatttctggtcatcaaggatggctgcgtgcgcaccatccagctgtcggatagctccaacagcatcgaccgtgccctgaccatgctgcctgagctggtagaaaagcttaccactctggtcaaaaaggacgccaaggcacccgcagaggagcccaaggcagagtaaccttttatacaaatcaagccgcagccgcagatcttttggtctgcggtctatatagccgcgcactgtgccccgcaaaaacaggggagcggtgcgcgttttgagcgccgtgaggcgcacaaggagtaatattatggcagaagaacgtattcagaagatcatggccgagcagggtttgtgctcccgccgcgccgccgagcagatcattgccgagggccgcgtcaaggtgaacggccacccggtcaaggtgggcgacaagatggaccccaaccgtgacgtgctccatgtggatgacgagcgcatctacatccaaaagaaccagcagttgtattatctggcgctgtacaagccccgtggctatgtgaccaccgctagcgatgagctgggccgcaagaccgtgatggacttggtcagtgacatccccgcccgcctgtacccggtgggtcgtttggataaggacagcgagggtctgctgctgatgaccaacgacggtgcctttgcacaggccgtcacccatccgtccggcggtatctccaagctgtaccgcgttaccgtgcagccccgcgccgacgaggccaccatcctcaagctgagcagcggcgtcgtgctggacgacggcaccaagaccatgccctgtgccatcaatgtggtcactgacgagcccggtcgtaccgtgatggagatgaccctgaaggagggcaaaaaccgcgagattcgccggatgtgcgagagtgtgggtcttgaggtggtgcgcctgaagcgcaacgccgagggtgtggtcaagctgggaatgctcaagcccggtacctaccgcgagctgactaaggccgaggtgaacggtctgcgtgccgcagcggtcaagggtcgtgcacagacccgttctgctgcgcagcagtccaaggctgccgagcgccgtcctcgcggccccgtgggcaaaaacacaccccggaaacagaagtaaggagttatcggatcatggaacgagaaactctgaaatcccgtctgggctttattctgctttctgcaggctgtgccatcggcatcggcaacgtgtggaagtttccgtatattgcaggtcagggcggcggcggtgcttttgtactgttctatctgatttttctagtcattctgggtctgcctatcatgaccatggaattcgccgtgggacgtgcctcccgcaaaagtccggtgcgggcgtatcaggcgctggaaaagccggggcagaagtggcacatccacggctacttcaccctcatcggctgctacctgctgatgatgttctacaccaccgtagcgggctggatgctgcactatttctacatgaccgccgtcggcaaactggcggggctcaacgccgagcaggtggccggtaagtttaccgaaatgctggccagccccgctactatgaccttctggatggtatttgtggtggtagtgagcattctggtgtgcgccaagggtctgcaaagcggtctggagcgcgtgactaagggcatgatgatcgccctgctccttattatggtggtgcttgccgtcaacagcctgttcatgcccggggcaaaggaaggcctttccttcttccttgtgccggactttgcccggatgcaggaggtgggcgtggtcaacacactggtctccgctatgaatcaggccttcttcaccctgagccttggcatcggtgctatgtccatttttggcagctatatcggtaaggagcactccctgctgggcgagtctgtccgcatcgtggtgctggataccttcgtagccatcaccgccggtctgatcatcttcccggcttgttttacttaccatgtagaccagaccagcggccctagcctcatcttcatcaccctgcccaatatttttgccaatatgtccatggggcggctgtggggcagcctgttctttttgttcatggcctttgcagccatgtccactgtgctggcagtatttgaaaatatcatctgctgtggcatggagctgaccggctgcagccgcaaaaagtccagtctggtgaaccttgtgctcatcatccttctgtccatgccctgcgtgctgggctataacctgtgggcatgggatggctttgcagtatttggcggcgctgtgctggatgtagaggattttctggtcagcaacctgttcctgccgctgggcagcctggtgtatctgctgttctgcgttacccgctacggctggggctggcagaactacaaaaaagaggtcaacaccggcgaggggctcaaagtgcaggactggatgcgcggctacctgacctatgtgctgccgctcattgtggtgttcatctttgcatttggtctctacgacaaattctttgcataagtgatcccggcgtctgctccgcctttgattgacgaacgggcggcacaagtgtaatataaaagcatatagggtgcttctcccggcggggaacactactatatgcttttttgtattcaaaaaggaggaaacaccccatgcacattctggtctgcgacgatgatgcggccttcgctgcgcggatggacgagtatatctcggaatggttccgcgctcgggagattcaggtgcagagcaccgtctgcaccagcggcgagcagctgctggctaccccggagctggaacgctaccagctggcgtttctggatgtagacctgaaaacaaccgatggcattgcgctggggcgcaaattgcggcagatcgccccagacatcgtgctggtgtacatttcggcttatctggaatttgccccgcagggctacacggtcaacgcttaccgctacctactcaagcgggatattgccgcccagctgcccagctgtctggaggatattttttccggcatgtccgacccccgaaaaacgctggaggtgcaccacaaccgtaccaccagtgagatcccgctggatcagatctattatctggaaagcgatctgcgacagatcaacgtctacggcgatatcccgcaccagcccatctgcaccttttacggcaagatcgctgacctgcccgccatgctgtatgaaaacggttttttgcaggtagggcgcagcgatgtggtcaatctgcaatatgtgcgctccatccgcaactataaggtggagctgcgcagcggggtagaactgagcgtcagccgacagtactatacagccatccgcagcgcatggctggaatggaaggggcagttcggcgatgaatgaagaattctggcgctggtatgtgtacggccactggatctgccttgcccagtggctcggctttatcatggtggaatatgcttatcttggcaagggaaagataaagcatccgctggtgtggtcctgtgttataaccatgctcacgatgaccctctcggtcgtgtacaactttggcttttttacgccgagggcagtggctctcacgatcctttttctgttcatcaccgtcatgctgtttggcggcacgccggggcaaaagtttaccgcctgcctgatcaacggtaccatgtgcctgttggtcgaaaacagtatgcggtatgtcatatcgtggatactgaagtgtgaactgcagcaggttatccaacgcgcagactgtctgatcatcatagcggtggcaaatttggtggtgggcgcagctgtggcctttttggtaagcaagtggcgcaggcgcaatgcactggagcctttgcaggcgctgaccatgagcttttttccgggcgtggtcgtggtgctgaacatcctgcttatgctcacagataacaacaaaagggccaccatggccaccatgggaatgacagtggggcttacggtggccgtcatggtgcatctgtgtatcgtggctatgttcaacgatcaggtcatgcagcgccgcagcctgcattttcaggccgaactggagcagcagcgggcctcggctctgctggattcctacaccgcccagcgccgcctgacccatgagttcaccaaccatatcagtgcgctgcgtgccttgctggagcagggagatgtgggcggtgcgcaggactatattgccggtgtggataaggctgtggcggccagcactaccattatggatacccacaacccgctgttggactccatcctgacccgcaaatacgaggaagccacccggcagggcgtaagcgtgtattttgacctttgcgacctgcgggatttccccttgagcggggtggatatggtcaccgtgctggcaaatctgctggataacgccatctgtgccgcagcgcaggcgtacccgccggaggtctacgtgcgagtgcgcaaaacggaggaggaatatcttctctcggtgcgcaaccgggtgcagcgggacgtggagctgccgccggatgggcagctgccccgcacaacccgcaaggagcccggccacggcatggggctttccaatgtgcgggacgttctgctgcgccacggtgcggagtataccctgagctgccgggacaattggttccgctttacctgtgcggtgcccaccggcaattcatgacatctgcaccgtcagaatatgacaatttatgtgcaacagaagcgtaactctgctatactgaacccagtaaaggaaaccttccgtgcggacatggtcacgttgcggtgggaggggaatacccttctttttaaaagctttgctgctggatggaaaaacagcctgcggtgcgtgtaaacaggctgcctacctttgctttttttgggctgtgcaggaatgcacagtaccttgctgacgggactttctgcggcgggccttttgggggttgcagtcgataaagtttctcgatgcgtcgcaattccggcgctgcctgctgtacgggaatgacataggcaagccggggtgtcgtgcgctgcaaagagtcccgtcagttttcttttgcaccaaaaaggactgctgtacatgggttttgcccaggatagcagtcctttttatctattaaatcatcgtatctgccagtcagcagaaagccgacccgccgcgcgactgtttcggtagaaaaccagcgcggcagctgcggtttccctctgcgtccctcccgtgaaaaagcagctcagccaagcccgcaggcttggctgagctgcaaaactaaaatgcaattccttaaactatgcgcagagcgaagcggagcgcatttaaaatcgtaaaaagcgcagttactccggctttacctgcagctcctgctcgcagtagatgcagcggtacttgccgttggagctcagctcaaagatctggtcgcattcttcttcaatgctggagatgcagcgggggttcttgcagcgtacaatgttcaccagacgcttggggggcttgggctgctccttgcggacagccttgccgttttcaataatggtcacgctgatgttcgggtccagataagccagcacatccaggttcagccaggaggcatcgccctctaccttgatgatgtccttgcggccgctggccgtctttttgctgcgggcgttctggatcagcgccacgctggcagtgcggttgcccgcaatgcccagcagatccatcagaccaacggcagtacctgccttgatgtggtcgatgacaataccgttctgaatctcgtcaatattcaacatatcagttctcctccttcggtgctttggggtctgcaagccccagcagggtcataatcagtgccatgcggacgtaaacgccgttctgcacctgttcaaaataagcggcgcgcgggtcgtcgtccacgtccagcgcgatctcgttcacacggggcagggggtgcaacaccgccatggtgggcttggcctgcgccatcttttcgcgggtcagcacatagctgttcttcaggcggatatagtcctcctcgttgaagaagcgctccttctgcacgcgggtcatatacaggatatccagctccggcatggattcctccagactgcgggtctccttgtaggggatgccgttggcctccagcacgtcgttgatgatataatccggcacccgcagctcctccgggctgatcagcacaaagcggatgttcttgcagcgtgccatggtcttgagcagggagtggacggtgcggccgaacttcaaatcaccgcacaggccaatggtcagatcatccagtctgcccatgcggcggcgaatggtcatcaggtcggtcagggtctgggtggggtgctggtggccgccgtcaccggcgttgatcaccggaatgcgggagtagcgggaggcacgcagcggtgcgccctccttggggtggcgcatggcaacgatatcggcatagcaggacaccacccggatggtgtcggccacgctctcgcccttggtggcgctggacacgttctcgctggggaagcccagtacatggccgcccaagttcagcatagccgcctcaaaggacaggcgggtgcgggtggagggctcgtagaacaaggtggccagctttttatggttggctacctcctgataggcagcagggtcggcgcagatacggtcggcaagatcaagcagctgtgtgatttcctgctgggtgagatccaaaggatcgatcaggtgacgcatagataagatacctccgtttaaagcagtttgcgtaaaatggaaaaatcaaaaaagtttgtgtagtagctcagcgagcgcatcaccggcctgcacaaacgattgaaacatacctcgtccagcagcagcatggcctcgcccggggcaagacgcatggctgcgcggatggcctcgtcgccgcagctggccttcaggtgcgccacgttggaggagatctgctggtggcactcctgctccaagatctcaaagatgtcgccggtcaggtcgatgcgggtgtagtcccggttgccgaacaggctgcggggcaggtagtcgatggagtagatcaccggggtggtgtcggcaaggatgcgctttttgatgcagatcacctcatcgccgacttccagcgccagcgcgtgggccatctcctcgcctgcacgaagaagcatcacctgaatgccgtcggcatgggggtagctgccaaaactgcggatcagcgggtagtactccagcttctggtccaagcggctgcgcagccccagcacagcgcggttcactaccgtgccaataccgcgcacccgttccacataaccggcgcgctccatctcgctcagcgcgtcacggatcacggtgcggcttacccccaactcggtggcaaggtctacctcggcgggcaggcggtcggcttgggcatagcgcccgttggtcagctcctccagcaggcttgcaacaacgcggtcactgatcacagcgccgcccaagcggctggacgatgccagtgcgggatctttcatggatggttcctccgtttccgggcggcagcgccgccccgaacttcatacgaacgggccgggaggattcctccacagccccttctcttttattatagcataatttgacatttagaaaagcgtcatttatactggaatctgctgaaaagtacgattttattttggagggcatagtacagatggactattttctgcaaaaagtaggcggccggcccgcccggcaggctgtcaccctgcggcgctgcacccctgtcgaagctccggcggtgttcgcgctgcaaaacgaagtgcgcgccgccatgccgcacccggagcagttcgtgccggatacgctggaaaatatcgcggattatctgcgcaccggggtgtgtatcggtgcgtggcagcaggggcggctgggggcctacctcatcctgcgcctgtgcgggcaaagcgatgaaaactacgctgcctttctgggcgtgccgcaaagtcagtggcagcactgggccaacgcagacagcgcagtagtgcacccggactggcggggcaacggcttgcagcgcgccatgctggaagcggctctgccgctgctgccgccgcagatcacccatctgggggctaccgtcagcccggacaacagttacagcctgcacaacgcacaggcttccggctttgtcatccgctgccgccgggagatgtacggcggctacgaccgctatctgctggaaaagcagctgtaactctatgcagttttggtgtacaactatttcgaaatgtgttatactatacggtatgaataacagcgaaggaaacaggtgaaaccatggcagcatctctcgggcaggaattctgcaccctgcgtgatacttacattgaaaagcaattcggccgcctgaacgatatgcagcggcaggctgtgtttactacggatggcccgctgctcatccttgccggtgcgggcagcggtaagaccaccgtgctggtcaaccgcatcgcaaaccttatccggttcggctcggcgcacggctccaaagaaacgccccgcccggtgaccgaggaggacgtcaaggctctgcgtaccgccatcatgaccggcaccgatgcccccagctggctggacgggatgctgcgccagaacgcggtgcgcagctggaatgtgatggccattacctttaccaacaaggcagcaggggagctgaaagagcgtctgcgccggatgctgggcggcgaggaaggggacgaagtgttcgcctccaccttccactcggcctgtgtgcgcattctgcgccgctgggccgaagagatcggctacccccgcagctttaccatctatgatacagacgatgcccagcgtgtaatgaaaaccgtatataaagagctgagcatcgatgataaattcctgcccatcaaggccgccatcaaccagatgagccgctggaaggatcagctggtcagcccggagcaggcacttgcagaccacgccagagacgtgaagagcacccagaccgcccgcatctacgcagcttacgagaaaaagctgaaagaggccggtgcgttcgattttgacgacttgatctaccagaccgtgcagctgctggctgaacacccggacgtgcgggagttctaccagaacaagtaccgctacctgctggtggacgagtatcaggataccagcgtggcgcagttccgtctggtcagcctgctcaccgggccggagcgcaacatctgcgtggtgggcgatgacgaccagagcatctaccgcttccgcggcgctaccattgagaacattctcaactttgaaaaactctatcccggcaccaagaccatccgtctggagcagaactaccgctccacctccaatatcctcaacgcagccaactgtgtcatccagcacaacaccgagcgcaagggcaagaccctttggacggacaacggcgagggcgataaggtgcaggtgtataccgccgagaatgagcaggacgaagccagccatatcgcggatatcatcggccagcacctgaaggagggcgggcatctggcagaccacgccattctctaccgtatgaacgcccagtcggctcccatcgaaagctacttcacccgcgcgggtattccgcataagatcgtgggcgggcagcgcttcaacgaccgcaaggaggtcaaggacatccactcctatatgtccattgtggccaacccccgggacgatgtgcggctgcgccgtatcatcaacgagcccgcccgcaagatcggtgctaccaccgtggatgtcattgcagaccttgccgggcagcagggggtcagtatgctggatatcatcagccatgcagaccaatacgcgaaactttcccgcgcggtcatgccgctgctcaagttttggcagatctaccagcgtttgcaggattctcttgccacccgcacgctggacgagtttgcctccgatgtcatcgagctgaccggctacaaggccatgttggaagcagacgccgccaaggggcacgaggatgccgccgaccgtctgcagaacttgggtcagctggtgaacaatgtcaaaaactactgtgaccagcacggcgaggaagccacgctggagggctatctggaggatatcgccctcatcagcgatatcgacagctacaacgaaagcagcgaccaggtggtactgatgaccatccactctgccaaaggcttggagttcccctatgtgttcctcatcggcatggaggagggcgttttccccagcgagatgagcaaatactccgaagcagatctggaagaggaacgccgtcttgcatacgttggcatcacccgtgccaaaaaggaactgtacatctccaacagcgtcacccggatgttgtacggccgcacccagcgcaacgagcccagccgctttctgcgggagatcgaaccggagtatatcgaggagacccgcagccctgtactggaacagcgttcccacatgggcggctggggctctgagtacagtgataccgtgcccggtggagcatccggttactccggcccctccggttacagccgcagcagctacggcggcggttatggctcgagttacagttcgggcaaccgcagcggctacctgaaccgggaatataacgccggcgaaagccgtggtttcggctcttcttacggaggaagaaaccctgcttcctccggttttggcagtcactatggcaacagctccacccagccgaccacaagaagcagcggatttggctccgcatattccggcggaaatgcgacaaaaaatactgtaaagcaaacagcctttacggtaaattctgccgtgaaaccggcggcttccggttcaaagcactatgagccgggcgacatcgtggagcacaaagtgttcggccgcggcacggtgctgaaggtaaagcccgctgccggggatcagatcgtagagatcaactttgaaaaagttggcatcaagaaaacgatggccaattttgcgcccctgaccaagattacggaggaagaatgaccctatgatgactgttcgtttgatcgcccacaccccggaaccggaaaaggtggtggcggctgccgcaaagctctgctattccgacgcccacatcaccgaccttctggacgggctggacgaggaaaaaactgcaaaattcctgaccatgctcagcgaccttggccatgccagccccatcgagcacgccagctttacttttggcatcgagggggtcagccgcaccttgcttgcccagatcacccggcaccgcatcgcatccttcagcgtgcagagccagcgctatgtgcgtctggatgatttccgctatgtgacgcccccggagatcgaggctatcccggaagcaaaggcagctttccttgccagcatggaggaggacgcccagcgttatctcgaccttgcccacaagctggaggaggggcacaccgcccgcctgatggctgagggaatgccggaaaagcaggcccgcgctaaggcttctaaacaggccaacgaggacgcccgctttgtgttgcccaacgcctgcgagaccaaaatggtggtcaccatgaacgcccgcagcctgatgaacttcttccagctgcgctgctgcaaccgcgcccagtgggagatccgggaactggccgaaaagatgttcgcgctggtgtacccggtggcaccccatatctttgccaaggccggccccgcctgcctgtgcggcccctgcccggagggcaagatgtgctgcggcaagaccgccgaggtgcgcgcaaaatatgccgccattaaagaaggtgccgccgtatgagcaagggcaaactgattgtgctggaagggctggacggaagcggcaaggccacacaggcaaagctgctggcagagcatctcgccgcgcagggtgtgccggtacaaaagatcaccttcccggactatgccagtgattccagcgcactggtcaagatgtatctggccgggcagttcggccagcacccggacgatgtaaacgcctatgcggcttccagcttttacgcggtggaccgctatgccagctataaaaccagctggggcagcttttatgagcagggcggtgtgatcatcgccgaccgctacaccacctccaacgcggtgcaccagtgctcgaagcttccgcaggagcagtgggaggaatatctgcactggctgtttgattacgagttccgtctgctgggacttcccgcaccggacagggtcatctatttacaggtagacccggcggtcagccagcggctgatgacccagcgctaccacggcgacgaaagcaaaaaggacgtgcacgagaaggataccgcctatctggcgcgcagccgcgctgctgccgagttctgtgcccggcatcttggctgggataccgtgcactgcaccagcggggacgccatgcgcagcattgaagagatccagcaagaggtgcaacagcttgcccggaaaacactgggctgaacgataaaatatgataagagggggcatcctgaacgatgtatcgtctgatgcagccgtctgacgaggcggcagtgctggctttgtggcagagccagcatcatgataccgaagattttgcaaaaatggtactggaacgctttgccggtgtgcagaacatttatgtggccgacgaaaacgacgccatcgtggcggctgcgctggctgtgccggtcaccctgcaggggcgcacgggcaattacctgtgcctgtgcggcgagggcagtctgctgctggcgggtctgctggataccctgtgcgcccaccaaaagctgcggggcgcaggctttaccgtgacagtcccggcagatgcagcacaggccgctctgctgcaggataaaggctttgcaaaggcttttgccctgcgttgcctgcctcgtgaggtgagccgcaacctgtggagccaggcggaatttgacacggtgacggccaaaaagctgtgcgagctgcgggaacagttctggaaggataccgtgcagctgagcccggagcgcatggcggtggtgctgcaggagctgtacgcccggggcgctaccatcgtgtccaacgaacatggctacggcatctacttccgcaaggaggataccctgtattttgtggagatgatggccgacagcgaccgcgccgccgagatcctgatggaagccgcccgcgagaaggaagtcatcgtggaaaaggcggtcatcacggtaggcgctgcccagccgctgtttctgggcgagggcacccggcaggaatacggcatgatccgctttgacgcagagccttttgacgtaagcgaaagctatctgcgtctgatgctggaaaactgaaaaaaggaaggtgcgtatggcacacaacgatacacacgcagcccgcaaaaagggcggcgcaggcaaaattctgctggtagtgcttctgctgcttcttctggcagtaggtgcagcggtgcactttgcctacaatgagatccacggcaatggtgcacccggcagcacagaggtgaccgtaagcatcccgcagggcagcggcgtagcggcgatcgccaacaagctgaaggaggcgggagtcatccgctctgcctacctgtttcgctggtatgtgggggaaaagggcgctgccgcaaagctgcagtacggcgattttgtcttgcagaccagtgcgatttcctacgatgcgatcattgccaccctttcccagtacgccaaggcagaaacggtgcgggtaactatcccggagggcaccacggccattgccattgcccagaagatggaagccgccggtctgtgcaccgccgaggagtttctgaaggaagccaacgagggcgatttcagcacatataccttctggcagtacgtcccggaggataaggatgccccgaaccgctttatgaagtgcgagggctatcttttcccggagacctacgattttttgaaggacgatacggtgcacaactatgtggctaccttctacgcccagttcgatgcacaatttaccaagggaatgtacgcagcgctcaaaaagcaggacatgaccctgccggagctggtcacccttgcctcctttgtgcaggaggaagcgggcaacagtcaggactccaatgtggcgcaggtattccgcaaccgtctggcggagggctcgccctaccccaggttgcaaagcaacacctccagccatatccagagcgatgccgacaataattatctctggaactgggtcgcgccctactacggcggctgggacgatatcccggaaaatatccttgcagcctacgacacttacagctgtatcggcctgcccgcaggccctatctcgaaccccggccttgccgccatcaaggcagcgctggagccgcagcccgatgaggaagccaaggacgcttacttctttgtgaccgacctcaagggcaattactactatgcccacacgctggcagagcacaatgccaactgcaaaactgccgcagctgtgaacaaaaacctgaaaaactgaggaaaggccgctgcacaaaaacatggtgcggcggcccctttccggtcagaaaactgtgatacataagagaggaacctacaaatgttacagatcccggaactgcttgccccggcgggcgatgcggaacgtctgcgttatgccatcaactatggtgccgatgccgtttactgcggcctgccggagtttggtatgcgctctgccccggctaatttcaccccggagcagctgacggaaagcgtcatctacgcccacgcccgtggtcgcaaggtctacctgaccatgaacaccttgcccaccaacgaggaggccgaccgtctgccagaggccatcaaggaggctgccaaggccggtgtggatgcctttattgtggcagaccttggtgtgctggacgcctgcaagacctttgccccggacattgacgtgcatctttctacccagaccggcatcaccaactgggcagccgcccgcgccgcctacaaaatgggcgcaaagcgggtggtgctggcccgggagatgaccttgcaggatattgccatcctgcgcgataagaccccgccggagctggagatcgaagcctttgtgcacggtgcgatgtgcatgagcgtgtccggccggtgtctgttgtccaactatatggccgggcgcgacgccaaccgcggccagtgcgcccagccctgccgctggaagtattacctgagcgaggagacccgccccggccagctgtacgagatcggcgaaaacgagaacggcagctacatccttaacgccaacgatatgtgtactgcgcccttcatcgacctgatctgcaaggcgggcgtggacagcctgaagatcgaaggccgtgccaaaaccttctactatgttgccagtgttaccgctgcctaccgcaaggcactggacacctatctggccgacccgacaaacgataactttgaactgccgccggaggtgtacgcagagcttacccgcaccagccaccggcactactctcctggcttctattttggccgcgagcaggccaagcaggccactgacagcgccacctacatccgcgagtgggagttcgtgggcacggtggacaactgggaaaacggcatcgcccactgccagcagcgcggcaaatggagccttggggatacgctggaggcgctgtgcccggacggacgcagcatcccgcttaccccggaatggatcgagaacgaagcaggggagcgggtggaaagcacccctcacgccatggaaaaatacaccatgcccaccccggagctgccgcccatgagcctgctgcgccggaaaacggtgtaacagcgtgacaaaaaggaaggaaaatgctgtgaagcaacataacgcttctgaccgctatgcccttctggacgagctgcgtgggctggatctgctcagtatgatgctctatcacggctgctgggatctggtcaatctcttcggcattcaggccgactggtattatggtctgcccgggcatctgtggcagcagagcatctgttgggtgtttattctgttgtccggcttctgtgtgcaactggggcatcataccctgcgccggggcgcacaggtgttcggggcaggggcgctggtcacagcggtcacgctgctttttatgccggaggacagggtcgtttttggtgtgctgaccctgctgggcagcgccatgctgctgaccggccttttggaaaagccgctgcggcgcattccacccgcagcagggtttgctatctccgcagtgctgttcgcccttacccgcaatgtttcggcaggctatctgggttttggtagtctgcgcctctggctgccgcagacactctatgcaaactacgttacagcgtactttggcttttatccgtggtggttctattctacggattattttgcccttctgccgtggctgtttctgttctgggcagggtactttctctacggcattgtagggcggcagcgcatggagcccttgcgttgctcggtctgcccgccgctgggctggcttgggcggcactcgctgctgttgtatctgctgcaccagccggtcatctacggggtgctgttggtagttttccgcgtattaggcggctgaaatacacgcttcatgcacttttgagaaaggcggcattgttgcaccgtgcaaacattgcgcgaacgtcttgacaagcagggcagggctgtggtatcctgttgacggttagaaaatgctaactacaaaaatgcgtcatgaaacatggacgcattttcacagaacatgaagttatccaaaactaactgcgcagagaaagaggtagagttttatgagcaaagtagcaatcgtattttggagcgcaaccggcaacaccgagaccatggcaagctgcatcgccgagggcgcaggcgccaacggcaccatcgtaccctgcgccgagatgacccccgcaaagttggcagagtttgacgtggtggcctttggctgcccggctatgggcgcagagcagctggaagagagtgagttcgagcctatgtttgctgcactggaaggctctctgaacggcaaaaagatcgcactgttcggctcctacggctggggcgatggtcagtggatgcgcgattgggcgcagcgcgcacaggacgacggcgcacagctgttcagcgaggaaggcctcatctgcaacgaaacgcccgatgatgatgtgcaggctgcctgccgtaagctgggcgcagatctggctgcttggtaaaacccatgtataaactcttgctccatagggcaacctatggacaaagaggtgataaacatggaaaacatcggcgtgacctgtgatgtctgcgcgtgctgccacaacgtggacggctgcaaatgtgatctgccgcagatcaaggtgacggagcagtgcagctgcaccacccagcaggtggagaccccgcactactgccagagctacgaggaaaagtaagttccccaccaacgcacagcagcccctgccggagaaacctttccggcaggggctgctgtttgttatatgaacattcagcgcagcgccacgttacaggtggcaaggctgcggatcagcgtaccaacgctgtccttcatctggatgccggcaaagcccagcgcaaaggcggcctgcacgttttccagtctgtcgtcgataaatatgcattcgctggccttcagctgatactttttcaacaaagccttgtagatctgcgggtcaggcttattcacctgtacctcgcaggaggctacaccgccatcaaactgagccagtacgccgcgctcggtcagcagctccagcacatcctgcgggatgttgctcaggtaatacacgcaatagccgtggttcttcagccgccgcaccagctccagcatccgcagacgcgggcgcagaatgtgcatccagtcgtccagaacgccctgcacctcaaaggcacagccctcggcacgggcgtgctccagcatccgctggttgccgtcatagcgagaaagcttgcctgcgtccagcaactgccactcctcgctgccaaaggtcaaatcgtagaccttttcctccatttcggcgttgcacagccggtctacaaggtatgccttggggtcaaaatccaccagtacaccgccgatatcaaaaataatgcttttatacataaatactgcctcgcttgtattggatgttttccggatattttccatagtataccacaaccgggcgggtgctttccacccctttggcatagaaaatgccgccctggcgtatgctgtgacagaaaggggagagcaccatgacgatccgggaactttgtgagaaggaggtcgttcagctggagcaggggatgtgccttggccgcgcggacgatctggagcttgaccccgcaacggcgcagctgcaaagcttgattttgctgggcagaccgcggctttttggcctgctgggccgggacgagagcctgaccatcccgtggcaggagatcgagaccatcggcacagatgccattctggtgcacactgccgtgccaaaagcaccggcagcacctcacggcttctggcagcagctgcgggcaaagcttggtctgtgaaaaataggggaatattttgaaaaataaaactgtaatttttgtaaaatcatgaatggacattttcagcaaagtgactataataggcacgaaaggcttgtgcaaatagcaaagccactttggaaatagggttcgggacgtggaaagggatatcgactatgaaaacatccaaaccgctgttgaccctgcggatgctcttcccggcggcagcttcctttatcgtgctgctgctgggtgagtggattgcgcgcgggtcactgaccgctgatacctttatcagctttattttcccccatttcggggcatatctgctggcatggctgctgctgtttctggtgtgggagctgctggactgggtgctgcgcatcccgccgcttgctacgctgggcatggccgttttgggctgtgcgccctgcgcagtaaacttctataccatgcagctgcggggtgaaccctttctgccgtgggacctgatgcaggtgtccgaagccgccggtgtggcctctgctgccgggctcaagctgcagaccagcatggtggtctccattgtgctggtgctggcactgacggtggcaagcttctttgtttaccgcgggcggctgcgccagcgctggttgccaaggcttgcgggcaccggtgcctcggcagcggcgctgtgtctgctgatcttcggcgtttatttacagcctgcagtcacgcaggttttgggcatcacgccggatgcgtggatgcaggaccgctactaccgttactacggtgtgcttaccggttttatgaccaacctcaccaatttggagattgccaagcccgagggctactcggagcaggcagtggacgatattctggataacgtggccgagagtgagaaattctccaccggccccatgtatgcaggcagctatgccgccactacccccaaggaggagcaggcaaagcagcctaccattatttatgtaatggatgaatcctactgggatgtttcggagctggagcagtacggcatcacctttgataccgatgtatcgcagaacctccacgctttgcagcagaccagcgcctacggcagggcatacagccccagctttggcggcggcacctgtgatgtggagtttgaagctctgaccggctactccgtgtccttcctgcccagcggcagcaaaccctaccagcagcacgtcacaaagcccatgttcgccctgcccaattacctcaagctcaagggctaccagaccgctgcggtgcactgcttctgggcaaaatactggagccgcgataaggcctaccccaacctcggcttcagcgattttatcagtctggaggatatgcacggtgtgaccaaggtgcgcaagcactactggaccagcggccttgtgaccgatgactccatggccgaccagatcattcagcagtatgaaaagatgagcacttcctctgataagcccatcttcctgcatgcagtcaccatgcagaaccataccaattataatagggataactacccggacgacgagcgggtgcacgtcgtgtcccatccggtggggctcaagagcagcaccgtgggcgcgctggaagattttgctaccggcatccgggatgcagacgccatgctgggcaagctgacggaatacttctctcaggtggacgagccggtcattctggtgttctggggcgaccactataaccccatcgattccaattacgatgtctacaccaccaccggctacgcaagcggctccagcaccgatccccgcctgcaccagaccacgctgctgatgtggtcgaattacagccagcagcaggtggactttggcaccattgccgcttacgatatctccccggtgatgatggagctgttcgggctggagcagccgctgtacttccagttcctcaaccggcagctgcgggtcgccagccgcagctgcacccgcggcaccaccatgaatctggatggtaccaccacccagcagcccacggagttccagcagcgctggacaaacgagcactggatgctgcaatacgacctgatgttcggcaagggatacgccctcaaccgtatgggtgttgcaggtttgagcgggatgaatacgggcaaataagagaaaaagtaagcatttctttatacaaaacagagaaaaccacttgcaaccgcattctttttgtgctattataacaaagcattacacacgcatcactatgcccttttgtgcccttttgggttgagggcagtccgccggtacccgatgtaccgtgcagatcacggtgtgcggaggcaaaacaatatctggaggtattttattatggcagtcgtttctatgaagcagcttctcgaggcaggtgtgcacttcggtcaccagacccgccgctggaaccccaagatggctaagtacatcttcaccgagcgcaatggtatctatatcattgacctgcagaagaccgtgaagaagctggacgaggcttacaactacgtgaaagaagttgcagctgagggcggcgacattctgttcgttggcaccaagaagcaggctcaggagtccatccgtgacgaggctctgcgctgcggcatgcactacgtcaacgctcgttggctgggcggcatgatgaccaacttccgcaccatccgtaagcgtatcgaccgtatggatcagctggctaagatgaaggagaacggcaccttcgagctgctgcccaagaaggaagtagctaagctggagctggagatggagaagctggacaagtacctgggcggcgtcaagaacatgaagaccctgccgaaggctatgttcatcgtcgatcctcacaaggagcgcatcgctgttgccgaggctcgcaagctgaacatccccatcgttgctattgttgataccaactgcaaccccgatgagatcgactacgtgatccccggcaacgacgacgctatccgcgctgtcaagctgatcgccggcgctatggctgacgctgtgctggaaggcaagcagggcaaccaggaggccgctcccgccgaggacgcagcaaacgcctgatttcccattccgcaaccaaacaaataacgtgtaagggagaaaacaaaaatggctatttctgcaaaggacgttatggaactgcgcaagcagaccgactgcggcatgatggagtgcaagaaggctctgaccgaggctgacggcaacttcgagaaggcaatcgagatcctgcgcgagcgtggtctggctaccgccgccaagaaggcaagccgcgttgctgccgagggtatggtctacgctgactactgccccgcttgcaaggtcggtgttgtcatcgaggtcaacgctgagaccgacttcgttgccaagaacgacaagttcgttgacttcgtcaaggaggccaccaaggtcatcatgaagcagaaccccgctgatgtcgaggctctgatggcatgcaagaccgaggctggtgagactgttgacgaggctctgaagaacctgatcctggtcatcaaggagaacatcaaggttcgccgcttcacccgttacgagggcgtctgctctgcatacgtccacggcggcggcacccacggcattctggtcaacttcgagaccaccaacgacatcgatgctaaggacgagttcgttgcttacggcaaggacatcgctatgcaggtcgctgctgctaaccccggctacgttgacgaggcttctgtccccgccgaggtcgtggctaaggagaaggagatcatgctggctcagatggctcaggatcccaagaccgctaacaagcctgaggctgtgaaggcgaagatgatcgagggcaagatcaagaagttcttcaaggagaactgcctggtcgatcaggagttcgtcaaggatggcgacctgaccgttgctcagtacaccgctaaggtcgctaaggacctgggcggcgagatcaagattgtcaagttcgcccgctttgtcaagggcgagggtctggagaagcgtgctgacgacttcgcatctgaagttgcaagcatggtgaagtaatttaaacttccaaagacaaaaggggagccgtagtacctgtaacagggggctgcggctcctttttttatgtttatgaaaatacaaataccgggcagcccgcagcctgcccggtattactgtataaatcttcttacgcttcgtccaaaacctcttcgggatcctcaatagcatcctcgatggtttcctccacctccatcgcttcttcagcgtccggggcggcaagcaactcctgaatctgatcccgcagccagagcagacggttgtccagtgccttgtcccgtgccagcagcggcgcaatgatctcaggcttatcagtgatcaggtcatccacacccagctgcagcagcttttccgcatcctgctggcggttgatggtccatgcagagatggtcttgccgcgcagatggatctgctgcaccataccggcggtgataaaggtggattccacgctgaaaaagtctgcggcaggcaggtcgtagtaggtgcccacgcccagcgccagaatataccctgtggtaatgtccgggtccagctccttcaccttgcacagggtctcgtagctttgagaggtgaccacgcagtccgcgccgtagtcgtatgcgtggatcagccgcaccatttcggcctccaatgtcggcgtaaaggtgctgggcttgatctcgatgttcagctcagtcttgcccttgcacagcgccagaacctcttccagcgtaggaatataggagcccgtaaactgccgatggaaccagcgcccggcatccagctgctgcacctgtgcatagggcaggtcatagatgttggcgttgcagccggtacaccggcgcaggctggtatcgtgggtcaccacggctacgccgtcagcagtcatctgcacatccagctcaatgcggggactgccgtgctccagcgcggtctcgaaggcagccatggtattttccggcgcacgggaagaatagccccggtggtaggtgatcaccgggtcagaaagacccagcacgctttgcagcggctgtgtttgcgggaaaagcagatataccgctgctacgccgcaggtgaccagtgcggcgcaggccatcatcccggccaacaccgtctgctcacggggcagggcagggagcactccggaaatggtcggctgcgctgcatcggactgtctggtcacttcatacagtgcctctgtaagggtgctttgcgccgccgtcatggcgcagtccatgagcagacaaaggaacggcagttcgatcagcagtgccgcgcgagaaagcgccagcagggcagcagtgctggcaaagccgacaccaagaatgacacaatagaacagcaaagccccgcacagcagcatcagcccggtgcgcacggtagcggtcagcatccagcgcagtgccagtgcaagcagttgcccggtgcggctgcgcaaaacccgcagactctccgcaaatgcacagccaaagcttttacgttccagcaggaactttggcagcactacaagcccgtccagcagcagcgccagcacacaaagcactgccagagcaaatagaaaacggttggcagcgcgcgctttcagcagcccccagagatattccggtacggcaaactgggtcagatggtttgctgccagaaaaaagttcgtcagcgggatcagggcaacgccatacagcagcagcgggaggttctgcggcagaaacactcgcacaaggctgcgaaaggcatcccggaacaccgcacccacccgcagcggctcaccgtgccgcacccgcgtcaatagctgcagcatcgcggcgatttcatacaggctccaaaaggctgccagcaccgccagcacgacgatgcacccgatgatggcaggggaggcaaagatgcgggatgcagttttgttgttgaggtagcggatgggcgcgaaccgcagcgtcagcgcccagatcagctgcagcgctggtacgaacaagaagtttgtcagcaccttataaaacaacagaaaaagcagaaacacccgcccctttgacgaaagcagggaacgagcggcagcgtgcagagaacggtaggtctgctcctgctgctggaactttacggaaattcgcttcaagatagcttcaacctcttttgcatatttggcgggcttttcaggtacagtttggcagattgcccggaaatatatgattttttaatatagtgtaacataaacgcaacggaaagaaaacgcagcagacgggtgcagttttgccaaaaaaaccgggaaaatttctacatccacaaaatgggcgtgtgatagcatttgtccagataaaacgtgcaaaacgatgaatcgttaaaaatttgagtatctataagtgacggatgttgaatcgcatggaattttatagaatctcttgcatttttttgccagcttctgtataatgaatataattttgaaagctcacacagacaaccaggaggtctaattatggcttcaaagatcaataagggagaaatcctcgccaagttcttcgatgacggggagtacactgcgctgtttgctgatggtgcagtgagcactgcctgcggctatgctgcaggtcagcaggcttacgccgtttatcagaatggcgaggctgtcaccgtaaaggatgttgaaaagaacatcaaggttctggaaatggctgcacagaccggctgcccggtggtcaccttctataactcggttggcgcaaagctggccgagggtctggacgtgctgaccgccagcgcaaagctgaatgcacagatcgcaaaggtctccggtgttgttccgcaggtggccgttgttctgggtgtctgcggtggcaccagtgctctgagcgctgccaacgcagacgtctgcatcatggccgagggcgcagagctgttcttcaccgctccgtttacctccgctgccaagggcgataaggtcgccgacgcaggtagcgctgccgctgccgccaaggcaggcgtggcttccatcgtggctgccgatgccgcagaggctgctgaaaaggccgctcacatcgtgggtctgctgcccgccaacaacctgaccggcccggcaattttcgagttcgagcagcccaccgctgttctggctgccggtgccgagcccgcaaaggctgctgccgctgtgatcgataaggacagcgccgtggagttgtacgcaggctttggcaaatctgtctataccgcatttgcaaccatcggcggcaacgccgtgggcgttgtggcaaccggcaagcagctgtgccacaactgcgtagctaaggcttcccgctttgtgcgcctgtgcgatgccttcagcgtgcctgtggtcaccatcgtggacaccgagggctttgtgcccagcgttaccgatgacgtggctggcggcatccgcgaggctgcccgtctggccgctacctacgccgatgctaccaccgcaaaagtggcagtgctggccggcaaggctgtgggccctgtgtacaccactctggccgcagccgatctgcgcatcgctgtgaccggctgcaccgtcagcgcactggagcccagcgccgctgtcagcgtgctgtacaaggatgagatcgatgcttccgacaacatcattgccgccaccaaggcaaaggctgctgcctacaccgctgaggtgtgcagcgctgccagcgcagtggccgccggtgctgccgatatgagctgtgatgccgctaatgtgcgcgccagcgttgtggctgcactggagctgctgagcaccaagcgcgctgcccgcctgcccaagaagcatggcaatatggccctgtaagcgtccgaatgtaagttaattgagttcgattttgaattggaggatccttccatgaagtactacaatattactgtcaatggtgttgcttacagcgtttccgttgaggaaactgccgcaggcgctgctcctgttgccgctgctcccgccgcacccgccgcacccaaggccgctcccgctcccgcagctgctcctaaggcagccgccggtgcagccggtgctgttgccgtcaaggctcccatgcccggcaacattctggatgtcaaggtcgctgccggtgcttctgtcaaggccggcgacgtgctggtcatcctcgaggccatgaagatggagaacgagatcgttgctccgcaggatggcaccgttgcttccatcaacgtgaacaagggcgataccgtcaactccggtgacgttctggtttccatgaactaaggaagaggtgacaaccatggcaaaaaagccgatcaaggtgaccgaggtcgtcctgcgtgatgcgcaccagtctttgctggctacccgtatgaccatggacgagatgcgccccatcctgcccgaaatggacaagatcaactacttctccgtggagtgctggggcggcgctacgttcgacagctgcatccgcttcctggacgaggatccttgggagcgtctgcgcatcctgcgcaaggagctgccgcatcagaagctgcagatgctgttccgcggccagaatatgctgggctaccgtccctacgcagatgacgctgtggagtactttgtacagaagtctgttgccaacggcatcgacgtcatccgcatcttcgacgctctgaacgacccccgcaacctgcagactgccatcaagtctgccaacaaagagggcgctcatgtgcagggctgcatcagctacaccctgagccctgtgcacaacaatgagtactttgcagcctacgccaagactttggaggagatgggcgcaaactccatctgcatcaaggatatggccggtctgctcactccctatacctgctatgatctggtcaagaagctgaaggaaaccgtcagcatccctgtggacatccacagccactacactgcaggtctggcttccatgtccatcctcaagggcatcgaggcaggtgccgatatcatcgataccgccatgagccccctgagccttggtaccagccatatgcccaccgagagcctggtggctgccctgcagggcaccgactacgacaccggtctggatctgaagcagctgaatgtcgtgcgcgcttactttgcaaagctgcgtgagaagtacatcgccaacggccagatcagccccaagagcctgggcgtggacgccaacaccctgctgtatcaggtgccgggcggcatgttctccaacatgctcaagcagctgaaggatgccggcaaggaagacaagctggacgaagtgctggccgagatcccccgcgtccgtgaggatgcaggctacccgccgctggtcacccccaccagccagatcgttggtacgcaggctgtgttcaacgtcatcatgggcgagcgctacaagatggttaccaaggagttcaagggtctggtccacggcgactacggcaagactcccgctcccatcaagcccgagttcaccaagaagatccttggcgacgagcagcccattacctgccgctttgccgacacgctggcgcccgagatggacaagctgaaggccgaagctgccaagtgggcaacgcaggaagaggacgtgctgacctacgcaatgttcccgcaggtcgctcccaagttcttcgataagcgcaatgccaaaaagcagggcgtggacggcgatcatgtggactacaccaaccagtctcatcctgtctgataaataaatccctttcaaggctgctgcacaaaatgctgtgcagtagccttttttgcgtatccggcaaaggcacaagacgtactctgtcgggtaatcccggaaaaacttctgcatacacattgacttgccgcccaataccttttataatgtttggtatagccgtacaatacaacaaatgatgtggaggaaaatgctatgcgaagcatcccggagcagcgcattgctgagtttcaggagcaggactatcaactgtattttggcatttcaaagctggaatttgaccggatgctcaaggctctgcatgaggcttaccgtcaggagcataagcgcaagacccgctttaccaagatctctatgatggataaactcatcctgaccctgatctatcgctacgagtaccgcacgatggaaagcattgccaaggaatacgaggtctctctggataccattgccgacaacatccattgggtggagcgcacgctgctcaatgcagatatcctgcaaaccagtgtgacctgcgtttataagacgaactgatgttatgaccctgcgtgaaaacgcggggttatattttttacaaggggaaaacttctggaaaagcggtaactgccgcagccatgttgttttggctgcgcagcagtaaaaatgaaaactgtgttttttgcacggatgcagtctgcaccttgaatttttcagaaaagaatagtaaaatgatgctatatgtatcgtaacatgggcttgtgtgcccaaagcggatacctatacagaaaaaccgaagttaaaccgcaaaagaataggagctagtatgatcttaagcatgaccggtttcggcaggggaactgccgtgctcaatggccgtgagatcactgtggaactgcgcagcgtgaactcccgctatttcgagtattcctcccgcatcccgcgcacctgcagttctctggacagccgcctgaaaaagcagctcaaccagcggatctcccgcggcaaggtagagcttagcatgaccgtccagaacgtggacgcagcggataccgtggtcgccgtcaacatggagcttgcccgcagctatcagcaggccatgcgggacctgtccgagcagctgggggtcaaaaatgatgtgtccaccgccgttctgacccgcttcccggatgtgctgaccacccgccacgccgatgtggacgaggagcagctgtggcaggatgtgtctgccgtcaccgcgcaggcgctggatcgttttgtagagatgcgcgccgccgagggtgccaagatgaaggcagacgtggaaagccgtcttgtgtttctggaacagtgcgtcggcaaagtggagagcctgagtgcaggccgggtggaaaactacaccaaccgcctgtacgagaaactcaaggtcatcctgcaggatcgcgacatcgatgacgcccgtgtgctgaccgaagccgccatctttggcgataagactgccgtggatgaggaaactgtccgtctgcgcagccacattgcacagtaccgcgatatcctgcagctggacgagcccgtgggccgcaagctggatttcctgacgcaggagttgaaccgtgagaccaataccattggctccaagtgtcaggatctggatatcacccgtattgtggtggatatgaaggcggagatcgaaaaaatccgcgagcagatccagaatctggaataatatgttgtggaggagcctatgaaactcatcaacatcggctttggcaatatggtcagtgcggggcgcgtggtggcagtcgtcagcccggactccgcaccggtcaaacgtctggtgaaggaagcacgcgagcgcgggatgctgatcgacgcctcttatggccgcagcacccgagctgtgcttatcatggactccgatcatgtcgtgctgtccgcccttcagcccgaaacggtggcaagccgcgccgccgggcaggagggtagagcatcaatggaggaagaaacatctcatggcgaatgataaatttctgtttgtagtttccggcgcagccggcaccggcaaggacagcgtggtcaaggcactgcgcgaggcacaccccgaaatcgaaaagaccgtctctgccaccacacgcgccccgcgccccggcgagcaggagggtgtggactactactaccgcacccgcgagcagttccagcaactgctggaaaacgatcaggtggtggagcacaacttctataacggcaactactacggcaccctgaagtctgaggtggaaaagcggctggaggccggtaaggtggtcgtgctggtcattgacgtgcatggcgctgctaatatccgccggatgttcccgggcgctaccaccgtgttcctgctgccgccctctgtggaggaactggagcaccgtctgcgcggccgcggtaccgagaccgaggaaagcattcaggagcgtctcgccaccgcccggcaggaactggccgagcaggataagtttaccgtaaagctggtcaataatcaaatcgagccctgcgccgcagagctgtatcaggtcatctgtcagcgcgccgggctgcaggagtgaaaaatcaagcgttgaaggagttggacgaatgcccaagacggtaggcgttgccgtcagcaatgcgaccttccattttgataagctgtatacctacgccgttctgccggagcaccagaatgcggtgcgccttggcagcatggtactggtacccttcggcaagggcagccgcgcccgcatgggtgtggtactggcctgcgatgccgagccggagcactccaagctgaaatatctgtttgacgtagccccggcttcggcctgcttgaccccggagctgctgcggctggtgcattttttaaaggaacgcaccttctgcacctactacgaggccgtcaaggcagtcattccgtacggtgcgcagtacaagcccgccgtggcggcagacggtgtgaccccggtgctgcaaaagcagcttacccaccacaccgaaaacgcctacaagctggtgggcacactgccacaaaagccaaagcctacggcaaagcagctggcggcggtggcgctgctgagcggcggtccccgcaccctgaacgagttggaagataagggcatcagccgcgccgtgctggataacctgtgcaccaagggtgtgctggaatgcagcaaggtgaataagtccatcgacctctacgcctccatcccgctgcgcaacgaccccatcaccctcacagagcagcagcaggccgcttacgacacgctgctgcccaaactagaagataccgcaccccattcggcgctgttgtacggtgttaccggcagcggcaagacgctggtgtttttaaagttgatttcccgctgtctggaacttggccgcaaggcgctggtgctggtgccggagatcagtctgaccccgcagatgatcctgcggctcaaaggacagttcggccgccgcgtggcggtgcagcactccgcgctcaaccataccgagcgtctgctgcaatggcagatgattcaggatggtggtgcagatatcgtggtcggcacccgcagcgcagtgttttcgccgttggaaaacatcggccttatcatcattgacgaggagcaggagcacacctaccggtcggaatccgcaccacgctactccgcccacgaggtcgcccggcagcgtgccgccgaaaacggcgcactgctgcttctggccagtgccacccccagcaccgagagcttctacgctgcacagaacggacgcacccagctggtgcgcctgaccaagcgctacggcggcaacccgctgcccagcgtgcagatcgtggatatgcgggcagagctggcagcaggcaatccccgcgagattagccttgcgctggaggatgccatccgccgcaatcttgaggcagaaaagcagaccattcttctgctcaaccgccggggctaccagaccattgcccagtgcgaggactgccgcgaggtgctcaagtgccccaagtgcagcgtgcccatggtgtaccacaaatcagcacataaggtgctgtgccactactgcggctcccagcaggagccgccgcccaccctttgcccggcctgcggcggcaagctgcagtaccggggctttggcacccagaaggccgaggaggaactggcaaagctcttcccggaggcgcgggtgctgcgcatggatcaggactctaccgccgccaaggacgcccacgaaaagctgcttgccaaatttgcagcgcatgaatatgacatcatggtgggcacccagatggtggcgaagggtctggattttgaggacgtgacccttgtgggtgttctgggcattgattcgctgctgtttgcgcaaggcttccgggcatacgagaacgtgttcagcctgatcacacaggtggtgggacgcagtggccgcgcaaaagagcccggctttgccatcatccagaccaccgacccggacaacccagtgctcacccttgccgctgcacaggattacgacgctttctacgagcaggagatcgcctaccgcaagcttggcttgtatccgcccttctgcgggctgtgcatcatcggctttgccggtgcaaaggagaacgaggtggcgcgtgccgctgcccgtttctcggcgcttttagggcagcaggcggccaagcagccggatctgcccctgcgcattctgggtcctacgcccggcagcattgaaaagatcaacgacacctaccgctataagcttaccgtcaagtgccgcaacgaccgccgtttccgcgaccttgtgcgcagcacgctggcactgtatgaaaaagaaaaactgccgtccaaggcatcggtcgtggtagacctgcactcggacggagacatctgataaaactggaggtaccattatggctatccgtaacattgttaaagaaggcgaccccatcctgaacaaggtctgccgccctgtgaccaattttgacgaccgtctggccaccctgctggatgatatgcgcgagactatgatcgccgccgacggcgtaggtctggccggtccgcaggtgggcatgatgcgccgcctgttcgtggtgtgggacaccaccgacgccccggaggagatccccgaggattacgagtacaagttcattgatttcgtcaaccccgagatacttgctgtttctgaggaggaagagacggcctacgagggctgcctgtccttcccggggcacaacggcgctgtgacccgccccgttgccgtcaaggtgcgtgcacaggaccgcaacggcgaatggttcgagctggaagctgacggcctgctgggccgctgcatccagcacgagaacgaccatctggacggcatcaccatcatggaatccagcgagtacttctatgaggataccgaggaaggcaaaaaggccgcccgcgaagcgaaaggaaacaactgatgcgcattttgttcatgggcacgccggatattgctgccgagtgcctgaaagccctgtatgctgccgggcatgatatctgtgccgtgtacacccggcgggataagccggtcggccgcaagcaggtgctcaccgcgccgccggtcaaggaggttgcgctggcgcacggtacgcccgtgttccagccccgcaccctgcgggacggcagcgaggatgacactatccgcgcccttgctccggaactgatcgtggtggtggcttatggctgcatcctgccgaagtccgtgctggaaatgccccgctatggctgcatcaacctgcacgtttcgctgctgccgaaatatcgcggcagcgctccggtgcagtggtctgtgctgaacggtgacgccgagaccggcgtttccatcatgcagatggacgaaggtctggataccggtgatgtgctgtactgcaaaaaaatcaccatcgaccccgaggagaccagcggtgaattgttcgaccgcgttaccgctgtgggtgccgaagctctgtgtgaaacgattcctcagatcgctgcaggtactctgacggctgtgccgcaacagcacgagaatgctacccttgcccccatgctgaacaaggagatggcagagttccacctgaccgatactgccacccatatccacaactgggtgcgcggcatgaacccttggccgggtgcatggttcatcacctccggcggcaaaaagctcaaggtgatgtccagccgcgtggccgccgctcatggcgaagcccccggcacggtgctggccacaaagcccctgaccgtagcctgcggcgagggtgccatccaactgctggaagtcgtgccggagggaaaaaagcccatggacggcactgcctttgcagcgggtctgcgcctgaaaacgggggatagcctctgatggccgcaaatccgcgtgcggcagcagttgccgcactggtacggcaggagcagaacggcttttccaatctggtgctggacgcagagctcaagcgccagaagctggaaggccgggataaggcttttgcaagtgccattttctacactgtgctggagcatcgcggcacgctggactatattctggagcagtttctgcccaagggtctggcaaagctggatgcacccgtgcgggaaattttacgcgctgcactggcacaggcacgctatatgcaggtgcctgtctctgctgcggtgaacgaggcggtcaagctgacccgcacctttaaaaaatccagcgcctccggccttgtcaatgccgtgctgcgcaaggcctgcggctatgatctggacgctgccgtttttacgggcgagatccagcgcctgatggtgcttggctctgccggactggatgtggcggaattcctccacaaaaattacccggatgaagcactgggcatcctgacctatcaggccgatggcggtttgaccagtctgcgtgcaaaccccctcaaggccagcgctgcacagctgtgcgcgctgcttacagagcagggcgcagcagaggtgcggcagggtattgtgcccggcagcgtgctggcacgatttgccggcagtccggcagacaacgaactgttccggcagggctactaccatgtggagggacaggccagccagctagcagccctttgcgtgggcgcagcccccggcgagacggtgctggatctgtgcgctgcccccggcggcaagaccattctgctggccgagcagatgcagggcacaggaatactgtacagctgcgatgcggcagagaaccgtgtggggctgatccgcaccgcggtagaccgcatgggctttaccagggtgcataccctttgtaatgatgccaccaaaccgaaccctgcactgcccatggcagaccgcatcctgacggatgtgccttgcagcggcttgggcattctggcaaaaaagccggatctgcgctataaaaagctggaagctgaccggcaggcagaactgcttgccacacaggcggcaattctggataccgctgcggcgctgctcaaggcgggcggacggctggtctactccacctgcaccatcgacccggcagaaaatcagcagcagatcgcagcctttttgcagcgccacccggaatttgcggtctgcgcgccggaggtgccgctgcccgccggaatgacggcaggggagcatggttgcctttcggtgcccacccgcaccggcatggacggctttttcctatgcgtgctgcaaaaagccaccggaacacaataagcacgacctttatggatcgtatcctgttataggagaacagaatggaacaaaaacgctgtatttcttccctgacgctggcagaactgactgatgaactaaaagcgctgggacagccgggcttccgggcaaagcagatcttccactgggtacaccagaagctggtcaccgagttttctgccatgaccgaccagcccaagaccctgctggcaaagctggaagaaactttttatatcgctgcaccgcagatcgagcgccgtcaggaggccaaggacggtactgtgaagtatctgctgcgcatggctgacggcaactgcatcgagaccgttgtcatgcgttaccactacggcaataccgtgtgcgtgtccacacaggtgggctgccgcatgggctgccggttctgcgcctccacacaggcggggcgtgtgcgcaaccttgaagcaggcgagatatgctccgagatctacactgcccagaaagatatcggcgagcgcatctcccatatcgtgctcatgggcatcggcgagccgctggacaactttgacgaagtgatgcgttttttggagaacatcacctcgcccgagggcgtcaatattggtatgcgcaacatcagcctttccacctgcggccttgtgcccaagatcgaccagctggcggagaaaaaactgcagctcaccctttccatctcgctgcacgcacccaccaaccagatccgcagcagtatgatgccggtcaacgatgcctacccggtggagcagctgatccagaccgtgcgccggtatcaggagaccaccggccgccgggtcagctttgaatattccatggtgcgcggtgtcaatgattctgatgtctgcgcaaagcagctggcagacctgatccggggcatgggtgctcatgtaaatctgatccccatcaacccagtggacggcagtccgtattccgccacggacgcggccaatgtgcgccggttccagcaaaagctcgaaagccttggcgtaaacgccacggtgcgccgccgccttggcagcgagatcagcgccgcctgcggccagctgcgccgcgacgaaatgaacggcaaggcataaacagagggagaaacctatgaaacttgcaggaaaaacggatgtaggacgcgtccggcaggacaatcaggatgattaccgtgccggggaactgcccggcgatgcagcatgggcgctggtatgcgatggcatgggcggcgcacgcggcgggcgggaagcctcgcagtgtgcgtgcagcgtcatcgagcgctgctttcaggagcagtacaaccagtgcatccccggcgaagaggagacttttctgaaaaaggcgctgctcagtgccaaccgctatgtgttccagaaggcactgcgggaggagtctctggccggtatgggcaccactgctgtctgcgcgctggtgcgcggcggcaaggcctatctgagccacgcgggcgattcccgcgcctacctgtaccgggacggtaagctggcgcagctgacccacgaccactcctatgtgcaggagctggtggactgcggcaccatcacgcaggagcaggcagagcatcacccgcagaaaaacatcatcacccgggcgctgggcgtggattaccggctggagccggagttcaccacagtagcgctgcaggcaggggatgttctgttgctgtgcacggacggcctgaccaatgccgtacccacagagcagctggagcaactgctgcgcagcgggtctttttacgatctgccagacgttctgatccgtactgccaacgaaaacggcggcccggataacattaccgccctgctggtgggggtggagccgatggaggtgcgccatggataacctgatcggtaaaagactggacggtctgtacgaggtgcaggagctgatcggctccggcggcatggccaacgtgtataaggcagtcatgcggggacagaacggccctgtgcccgccgggactgtggtggccgtcaaggtgctgcggcgggagtatatgcacgacccggatcttgtgcgccgctttaaaaacgaatccaaggccatctcgctgctgaatcaccccaatatcgttaaggtgtacgatgtctcggtcaacgaccatctgcagtatattgttatggaatatgtggacggcatgaccctgcgggagtacctcaacgagcggggcggcaagctttccagccgggagaccgtgcacttcatctcccagatcctcaaggcgctggagcatgcccacgccaacggcgtcgtgcaccgggatatcaagccccagaatattatgctgctggataacggccagctgcgcatgatggacttcggcattgcccgtatttcccgggcagataaccagatgctggccggtaaggcaatgggcagcgtgcattatatcagcccggagcaggcaaaaggagacgagaccgaccgcaccagtgacatctactctgtgggcgtcatgatgtacgagatgctctctggtcatctgccctttgatgctgacgacgtggtggaggttgccatcaagcagatctcggacgagccccgctcgctgcacgaactggcaccggaagtgccctatgcgctggtggagatcaccgaaaaggccatggcaaagctccctcagaaccgctacccttcggcacgggcgatgctggaagcactggacacctatgtgcagaacccctccgtgctgtttgaatatcagtatattacagaagaagcgcccgaaaaggtggtgaaacgtaccatgaaccagaaccgcgcgatccgtcagaacgaacagcccgcaccccgcaaaaaaggcaagggaaaaccgggcaaaaaacgccgcactgtctttttgccggccttgttcggcatcaccattgcctttgcactggcctgcatggcactgtgctggatgatcctgaacgactcctccaacctgatgaacaacaaggccgatgtcacccttggagactatatcggcatgaccaaggatcaggccatggccacggatcaaatcgcatccggccagatctccccggagtgggaagaagagtacaacagcaactacgccgccggttatatctataagcagtcgccggtatccggccgcaccgtccgcgagggacaaagcgtgactttgaccgttagtctgggcacccagtatgtcaccgtgccggacctgaccaactatgtgcagaccgatgccgaacagcagctcaaggcactgggcgtttcggtgctggtcacgcaggctgtggatacctcggtggcttccggtgcggtcatccgcaccgaccctgccgccggtacgcaggtggcggcaggctctacggtcatcctctatatcagtcgtccgcaggtgtccaccaccaccaaggtgccctcgcttaccggcatgagcgtggatgatgcccgcaccctgctggtgcagaaccatctggggcttggcagccagagtgaagaatacagcgaccagcccgcaggtacggtgctcagccagaaccctgcggcaggtactaccgcaaaactgaacagccgcgtaaacgttgtggtcagcgcgggcgctgcaccggtacaggaaccggagcagccgggtggcgatggcactacttccggcaccacgggcgaaggttctaccggcggtgagagcaccggcggcagcagcgagccgagctccagcagcagctccacaggcggcggtattctggactggtggtcctcgctgttgggctgacggaggatatgcatgaacggttatatcgtaaaaggcattggcggcttttactatgtaaaaacgccggatggcatcgtggagtgcaaaccccgcggcatcttccgcaaacagaagatcacccccgtggcaggggatgaggtgacgctggagaccgagaatgacgcagcggtcattgcgcagatcgagccccgcaaaaatgtttttgtgcgcccgccggtggcaaatctggatgtgctgttccttgtggccagcaccacccagcctacccccagcacgctggttctggataagctttcggccattgcggtggataagggcgtacagccggtggtggtgtgtaccaaaagcgaccttgccgaggcggattttctggcaaatgcctatgcaaagtccaccctgccgtttatccgcatcgactacgaaagcggtgcaggtctggacgaagtaaagcagtggatcaacagcagattgtgcgctttctgcggcaactccggtgtgggtaaatccaccctgttgaacgcattgctgccggacgccgcccgcgagaccagcgccatcagccagaagttgggacgcggccgccacacaacccgtgaggtgaccatctttgaagcctacggcggacgcattgccgacacgccgggctttgccagtctggaggcgaatcgtgccgggttcatccccaaggagaatctggagcacgccttcccggagttcgggccttatctggggcagtgccagtttaccggctgctcccaccgcagcgaaaaaggctgtgctgtgcgggctgcgctggcagagggcaaactttcccagacccggtacgacagctactgcgccatgtacgacgaggtaaaggatgtcaaggactggcagcgcccgaaagtgtaatacggaaggaagaatgagatgtcccgttgtgtgatcctttccgcctgcccggtgcagccggaatttaagcgcttgctgcgcagcgatgattttatcattgcctgcgatgcgggctaccgcaactgcgaacggctgggctgcaagccggatatcattgtaggcgattttgattccgctccctgtccgcagcagaatgcggacgatatcgtcgttttaccccacgtcaaggacgacaccgataccgagtatgccgcaaagctcgcggcgcaaaagggctttgacgaggtgcttttgctgggcgcactgggcggcaagcgggtggagcacacccttgcaaacctgtgcaccggccttgggctggagcagcgcggcatccgtgccgccttgcaggacgagcgctcccgcatcacctttgtgctgccgggcgagagccgccgctatcccaaggaggagttcttctacttctccgccttccccatggagggacgcgccgagggcgtgtatgaaaaaggctccttctatgagttagaggatgccgtgctcacagcaggctatccgctgggcgtgagcaacgaatatgccgaaggatcggactgcatcaccatcagcacacggcagggcgcgcttgtggtggtggagaccatcgcagattaaacctcttcccggaacatttttgcccgtcagacgctataatggggtaaacatgagcgaaaggcggggtggagatgcaggtagtggtcattcgcagcccgaaagcgctgtgcggcattctgcgcaagctgttcggcatccgcaaagagaactgaatccataaaaggccggtgtgtggcaaagctgctgcacaccggccttttactgccggcataccgccgcctgctgccgcatacactcttacggaaacggacagggaaaggagcacactgcacatggaactgaagatattccgggacacgctgccgcagggcggggcaggctgtaccgtaaaagcagaacttccgctggagaccgatatccgtatctcggatgacctgccgccggtgggtaagctggtcaagtgctttgtccgcccggttgttctgcagcggcagttgcaaccgggcagacttaccttagagggctatctgcgctgcacggtgttttaccagagcgaagcagaaaaagacctgtgccagaccgagcaaaagctgcccttcacccggcagctggagctgccggagcttgcctttacggcatggacagccgtggtggaagggcagacggagtacctcaacacccgcgcggcagacccgcgccgtatcgaggtgcggggcgcctatgggctggtggtcacggtgcatacccagtgcaagaccgaggtgatcaccgcactggcagatggcggcatcgagcagcagctgcgtacattgcaaggcgtgcgcagtgtagctgtgctggataagcttgttaccttagagggagagcttgtctttgcaaagccccccgcggctgtactggatattaccggcaacgcctgtgtggcagaggtaaagctgcttgccggtaaagctgttgtcaagggggaactgcgggtgcagtgtgcatggcgggcagaaggggacactgccctgcaaagtcaggcggcggcactgcccttccagcaggtaatagatttagagggcatcaccgaggactgccactgcctgtgtgtggcagagccggtgggctttaccctgtcgcaggcagaaagcgccgccgcccagctgacggcaaatgtcatgctgcacctgcgggcatggcgcagctatcagctgcaagtggcagtggatgctttttccacccggtttgtaacggaactcacaccgcagccactcgtcacagagcagttgctctgcaccctgaacgataccgccaccgccacaggctccggacctcttccggatgcaggggcgcagctgcgggcctgttttgtgcactacggcccccaacagaccgtccaaaaaggggagggctgggtgcttgccgccaaagcagtggtaactgcccttgcagagaacaccctcggcgagctggaaagctacgaaaaaaccttggaggtcgctgtcccgctgcccatcacgtcgccggagggaacagtgcttgtgtcggaatgctggttgagcactgagaacgtgcaatgtacctgtgcgggcggtacgctggaggctactatcacagtgcgggcagagggcacgattttaggctgcaccaccagcccggtcatcggcagcatcacccttggcgacccgctgcccgataccgaccccgagattgctctgcgtatctactacgcacaggccggagaggaggtgtttgcagtggcccggcggttccatgtagccccggcgcagattcttgcggcgaatcagctggaggaggaacttgcctgtctgccgcaggcacagcggttgctgatcccggtcacctgagctgcaaacttaactgtacccctttcccggatggcacaagctgccgcaccggggaggggcttttttgttcgtactgcgtagaaaacacaacgcaaagaattactgattaagccggcaaaggaaattgaaaaacagaacgaatcaacgttataaaatataatgagtatacgtttagtatcttgcgctagtgattaaaaatcaacatttgatgtgtactgatatcgatttcaacgtacgagagcactttaaaaatacgatttgtatttagcgctttgcagaccatccatggatgtggtatactaaggaagatacaaatgcaaacgactaccgctcggctgctgtgtccggtgtacagcactgtttctgccgggaaagcagcacggcgggcggcaaaatgatatcgcgggagagtggaatatttggaactggaacaggcaaaaaagcgtgtgaaagaactgcgcgcaattattgagaaaaacaaccggctttactacgatcaggatgcgccggagctggaggattttgaatacgatgccctgacgcgggagttgaaggaactggaagcacgatttccccagctggtcacagcgacatcgcccacccagaaggtgggtggcaccgccagcagcaagctgcccaaggtgacccatgccgtcaagatggaaagtctgctggatgcgttttcctttgacgagctgcgggactttgaccgccgcgtacgcgaggccggagtagagccggagtatgtcgtggagatcaagatcgatggcctttcctgcagcttggagtatgagaatggacagcttgtccgcgcctccacccgcggtgacggcgtggtgggtgaggacgtcaccgcaaatgtgcgcgccatccgcagcatccccaagacccttaaagacgcaccggagtttctggaggtgcgcggcgaggtatatatgccccacgaggcctttcagcacctgtgcgccgagcaggaattacagggtgctgcgccctttaaaaacccccgcaatgcagcagccggatctctgcggcaaaaggacgcccgcatcaccggcagccgtgggctttctatctttgtgttcaatgtgcagcagatccggggcaagaccctgaccaagcactccgaaagtctggattacctcaaaagccttggcctgccggtatcgccgcgctaccatgtggtgcatgatatcgaggacgccattgccgagattgagaacatcggccagaaccgtgcaaagctggattttgacatggacggtgctgttatcaaggtgaacgattttgcgcagagggagctgatgggttccaccaataaattcccgcgctgggccatcgccttcaaatacccgccggaggtcaaggagaccactctgcgcagcatcgaggttgccgttggccgcaccggcgtgcttacccccaccgcctgcttcgacccggtgtttctggcaggcactacggtagctcgcgccaccctccacaacgaggacttcatccgacaattcgggctgtgcatcggggacaccattcaggtgcgcaaagcgggcgatatcatcccggaggtcatcggtgtcacccatcatgcagagggagctgaaccctacactatgcccacggtctgcccctcctgcggtgcgccggtagtgcacttggaggacgaggctgccctgcgctgcgtgaacccggagtgcccggcacaagcactgcgcaacatcatccattttgcctcccgggatgccatggatatcgaaggtctgggcgaggcagtagccacccaattggtggaaaaggaactggtgcattccgcagcagatatctacacgctgacccgggaacaactgctggagctggacaaattcaaggagaaaagcgcggacaatctgctgcaagctattaccgcctccaagcagaacaatctggataaacttttgttcggctttggcatccgcaacatcggcgataaggcagccgcgctgctggcagaacatttcggcacactgcaggccatccgggaagccaccgctgagcagatcagcgaaatcgacggctttggcggcgtgatggcgcagagtgtggtggagttctttgccaaggaaggcaccaccgatctggtgcatcgccttgcagatgccggggtcaatatgcagtggaagggcgagccgaagggagataaactggcgggcaaaacgctggtggtcaccggtacgctggagaccctctcccgcaacgaagccgaggcgctgatcgtgaaaaacggcggcaaagccagtggctcggtctccaaaaaaacggcctatgtggtggccggtgcagcggctggctccaagctgaccaaggcacaggcgctgggcgtgccggtgctgaccgagcaggaatttcttgctatgctgcaggatgctccggcagaacaggaaacgacttaaagcgccctcttaaatgccgaaatacaagtaatttcaaaagcctctgcaatgctgttgcagaggcttttttgtttgcccgttcccggttcccggttctaatgacgcacaaagcgcatacaatgctagcacaaagctttcgtggaaggagaaaccaaagtggacgagtattaccgggccgtcagagcccttcccgcttggcttgcatcgccgctggcacagctgcccgtacaaacggcagtgcgcatacaggagctgcggctgcgcactggctgtgcggtcacatttaccgtacaggggcggcaatgccctgcttcggcactgccgggctgccctccaaagctggctgcaatgaggctgaatgcgctgcaaatagaagagatatttcacaccctttgcaacggctcggtgcacacccacgaaagggagcttgctgagggctacctgaccaccgctgctggaaaccgtgtgggcgtggcagggcagttcgtgcagcgggaagggcagtgcattgctctgcaaaaggtcacttcgctcaacctgcggatcgcacgcagttgtgttatccctttgccgcccgcgctggacaagctgctggaacagcactttaccgggctgctggtggtgggagagcccggcagcggcaagaccaccctgttgcgcactatcgcccggacgctggccgagcggcagcgtctggtggcagtgatagacgagcggggcgagcttttcccgccggaagggccgcttccgccgctggagcgcattggcggggtggataaagcccgcgccgtccagatggcgctgcgtacgctggcaccacaggtgatcctgctggacgagctgggcagtctggaggaaacgatggcactggagcagggctttttcagcggggtggattttattgccagtatccacgcgccggatgctgcacaggcgcagtgccgccctcaggtgcaggctttgttgcagcgcgggatgttgcggcagctggtcatccttgccggacgggagacaccgggttgcatcctggaagtgtgcgccgtatgagtggccttctgcacgggcttggcctgcttttgctcccactgtgcggctggctggcgggggatgcggtacaggctcagacaagtctgcaccttgctgccttgcagggcaccatcgcgttattacagcgcatccggcaggagatacagtaccgccgggcagacctgcaaagcctctgccggcagctttgccgcgagggccttttgccacaaaatcccggcggtacattgcagcagttgcctgcaccgtggcagctttcagcagaggagcgtgcctgctttgcagagtgctttagcggaatcggccgcgcagaggccgcacaggaatgcgagcggctgggttactatacggcgcggtttgaggactatttacagcaggcacgccgcacagcacagcggcaggccggtttgccgcaccgtctggggttggctggcggtatgatgctggcgctactcttttggtaaaagctgtacagaacaaaggagaaacggatggatatcgaacttgtgttcaaaattgcggccatcggcatcatcgtggcagtacttaatcagctgctcatccgctccgggcgggaggatcaggccatgatgaccacattggcggggcttgtggtagtgctttccattctcgtcaagcagatcagcaccctgtttgccaccatccggtctctgttcgcgctatgagcgcagcagttccggtgctgactgcgctgctgctgatggcctttgcgggagttctattgcagcggtattccccggcatttgcgttgctgctttcgctgggtgctgcggtgtggctgttgctccgtctggcacagccgctgcgcggggtactgcaagcaatggtacagctggggcagcgcaccaatgcgcaagccttttcctgccttttgcgcagcgcgggcatcctgttgctggcagattacgtccgcaccctctgcgaggaagcaggagcagatactcttgcatggtgcgccgggctggcggggcggtgtctcgtactggcagcagtatggccgctgctggaacagatattccagacgatctgggggttggcgggatgaaaaaacgcggccttatcatttgcggggcaacgctgggccttctgtgcagcaaaaccgccctgaaagctgcggcggcagaagccgcgccgtggcaaacctatctcgacaaggcacctgtacaggtcgagcagtttgcggcagacccgcttggcacccttgtgcgtttgtttgccgctgaaccggtgcaattgctgcgggatacgatgcaacaatatgccgacgttctgctgtttttgtcgctggctgccggacttgcatttctcttgcaggacactgccgacagagcactgctggagctggcggctgccggcggctgcggcgttttattgtggcaggaactggacaagcttgccgctgtcctgtgcacccggatgaccgggtggaaaagttatctgctgggctttttgccggtatacagcggcgtgttggcagctggcggtgaatggaacgccggagcggctgcaaacggctttctgctcacggtgctgtgttttatcgcgcaggcggtcaccctctggctgcagccgctgctgcgcagctaccttgccatcagtatggcctgcggcatcagttcccgcaaaagcctgtccgagggctgcgctctgaccgggcggctgctgcggcaggccatcggctgggcaggcaaagcgttcgccgctctgatgagcattcagcgcgtagtcacggtgcagctggatcgttcagcctcccgtctgggacagctgctgaccggcagtgtgcccattgtagggcaggcgctgagcaacgcggcagatgcagtgctggccgggatgcagttgctcaaaagcacccttggcattgccgcattgctcagcatcggggcagaatttgcgcccttgtatctcgggctgctgatacatctgctttttctgtcctgctgcggctggcttgccgggatcggcgggctggagtattgccataagctgctgcaatgctttgccgaagccgtgcgctgcatggcggctgttacggccttgttttttatgttgtttgtggtgggcatcgcactgctgatgctgacagggggtggttagatgcaggcatttcagcgggccgcggcagtattctgcatggcgtgcatcggggcggagctggtcagtttttttgctgggcaaagctgggcaggccggtgcataaaagccgcagccgggttatatattttagcagtccttcttgcgcagctgccacggctgccgggcaatgttttgaccgctttttcagggagcacagccccggcggccacgtccactgcacagccggatgcactggaaacggagatcctgactgagaccaaggctcaactggaagagtattgcactgcacagtgccgacagcaattcgggcttgatgccagcgtgaccgtcacgctggaaaaagccgggcagcaggtcgtggtaaaaaaggttgttgctgccttcccgacgggctgtaccgccgcccaaaagcaggcagcgctcagctttttgcagcagacactgggcaccgctcccacggcagcggaggagagcacaccgtgaagaagaatgaattgctttccgctttacgctctttgcaaaacaacaaaaaccgcaccgcgctggcggtgacggtcggcgtgatggcaatgttgctgcttttgctgtcggaacttttacccagcggcaacacgcagaaaaccgcggcatctactgtccggactgctgccgtcagccagtaccagacccaactggagcagcagctggaagagcttatcagccaattgcagggggcaggacgcaccacggtcatggtcaccctgaccaccggagaggagactatctatgcagtagatacccagaccggagatctgcaacagcaggagaagcacgttcttttacaggatgggtctgcgctggccgagactacctatctgccgcaggtctgcggggttgccgtgctgtgtgagggcgggggagatgtccgggttgcagctcgcattactgagctgctgcattcgctgttggatctgcccacgaaccgcatctgcgtggagcaacgcaagtgctgagctgttgctttgatcgagtaccaaaactatttacccaaaaacaaaggaggaagcgttttatgagagcactttccagaaacacccgcagggtcaccgccctgacactggcggcggcgctggtcattgccgtctacttaaactggcagtatgcccgggcagacattactccgcagacagaggacgacaccctcatggtctcggcagagccagtggaggcagaagcggagactgccatcacggatgcgctgcccacagaggcggaggccgcctccggtgtcaataaaaattatggcgaagcacagcttgtcagcgtagcaaacgacagcggcacccgcttttttgaacaggctcggctcaagcgggaaaaggcacacgacgaagcgatggacaccctgcaaaagagcctgaagtcctcctccctgacagcggaggagaaaaaggagtacaccgcacaaatggcggcagggctggaggatctgaacgtagaaaacgagatcgaaacgctggtgcgcgccaagggctttgcggattgcctgtgctttttgcaagcagggcgggcagacctgaccgtgatgacagcgggtgagccgctcacggcggcgcaggtggcacagatccgggatgtggtgatgaacaaaagcagcgtgaccgcccagaatattacggtggtggaggtaaagtaagcactctttatctatgcggatatcccggcggcgcaggcgcagcttttcttgcaggcagaaagccgtatgcgctgccgggatgccattctatgctgatttccatcttcttttccaaacaagtattgaaattacccctgcattgatggtataataactctatcaaaaatgaatgctgcgcgcctttatgcactgtacaagggcgcgtttgaacacaaaaggcaggcacggcagaccggtttcagggttttgaaaccgctgccggagcagcctttggatggaggacagcacaatggatttacagaacatggatcttcagggcggcagccttcagatttcgaccgaggtcgtgggtaagattgcccgctgcgccgcactggaagtggacggcgtcgccgaggtgtcctgcggcgtgcagaataaaaagctgaaaagcctgctggaatctgccagtatccagccgcctgtggtggttgagatgcgggacggcacggccagcatcactctgcacctgatgatgcagttcggcgcacggattccctctgtggctgaaaaagtacaggagaacgtcaagtctgccgtgcagaacatgaccaatgtgacggttagccgcgtggatctggtcattgcaggccttgccgaggctcagtaacaaattcagcaaaaaatcatatcagaaacgatcctcctcccggtacgcccggcggggagggtttgtattgcgaaaggaacattatggaaaatattctgccccgtagagaagcccgtgaaaacgcctttttgctggcattttcgcagacctttggtgacattcctctggccgaggcactgtccaaccacgctgagaacgacgaggagcatcccgtggacgccttcagccgtctgttgctgaacgcctactacgatcattccgcagaggtggatgacgagatccgctcccatctgcgcaactggactatggagcgtctgccccgcgtcagcctgactgtgctgcgtctggccgtggccgagatgctgttcggcggcgagaacaagcccggcgttgccatcaatgaggctgtggagctgaccaagaagtacggcgcgggcgaggactaccaatttgtgaatggcctgctgggtgctgtggcacgcgaccacggcctgagtgatgaagccgtcgcggagtcggctgaacagtgagccgttatacgctcggggtcgatacaagcaactatgcaacctctctggcagtttttgatacagccggggaggttgtttgtgcaaaaaagcgctttttgccggtaaaagccgggcagcttggtctccggcaaagtgatgcactgttccatcatacagcagctctgccggagatgctgcaggagctggcgcaggaattcgacctgacaaaaatagatgccgtaggtgtttcgcaaaagccgcgcccggtagagggcagctatatgccctgttttctggctggtgtcagtgcggcgaccgcctttgcggcggcacgggacattccgctgatccacactacccatcagcagggtcacgctgctgcggcgctgtatgccgcaaagggtgaggcactgttctcccagaaggtgcttttgttccatatctccggcggcaccacggatcttttactgtgcgatcaggtgcgtgctatcaccacccttggcaccagtaccgatctgtacgccggtcaggcggtggaccgcgtgggcgtgcggctgggctttggcttccccgcaggggcagaggtctcccgccttgctgcgcagtgcgccgaggatatccggcctaagtccagcgtaaaggggctgcaatgcagcctttctgggctggaaaatcagtgtaacgccctgcttgcggccggaaaagcaccggaatacgtttgcaagtactgcttgctctgcgtggcagataccgttgtccgcatgacaaaggctgcacagaaggaataccccggtctgccggtggtctgcgccggtggtgtgatgagcagcgatatcatccgcacatgggtgcagcagcgtttgccgcaggtctattttgtgccagggcagtattcaagtgataatgccatcggcgtatccattcttgctgcgcgggaggccggtctatggctgatgtgatctcggtatccgatctgaatcattatgtcaaaacgctgctggatgtcaacgatgggttgttcgatctggccctgcggggtgagatcgcaaattttgtgcagaacgcccgcagcgggcactgctacttttctctgcgggacgatgcctgcagcgtaaaggcggtgatgttccgcaccgatgcccgccgtctggcgtttcgcccggaggaggggatgcgggtcgtggtacgctgccgcgctaccctctacgagcgggacggtgcgtttcaggtctatgtaaacgagatgtttccggatggtctgggcgcggcacagcttgcgctggagcagctgaaggcccggttggaaaaggaaggcctgtttgatccggtatacaaaaagccgctgcctgcataccccgaatgtattggtgtcgtcaccagcaaaaccggggcggcgttgcaggatatccgcaacgtgatcagccgccgctggccgtccgttcggctgctgctgtgcccggtaacggtgcagggctttgaggctgcccggcagatcgccgccgccatccgcacgctggatcagagcgggaaggtggacgagattatcgtagcccggggcggcggtagcagggaagacctgtgggtgttcaatgccgaggaaatcgcccgggcagcatttcgctgcaaaacgccactgatcagtgccatcggacacgagatcgactacaccattctggactttgtagccgaccagcgtgctcccacaccgtccgctgccgcagagcttgcggtgccggatcgggaggagcagcagcgcatttttgaaaatattgaagaaaatattcacaaaaatatacaaaaacggcttgtgttgtgctataatggtctagagcaatacaactttttgttggagcagagcgcgccgagtaaaatcttacagcagtattcaaaccgtctgcaacagatacagcaggctatccggacgcagcaaaaagcgcgtatgaatgacaaaagcatgcagcttcaacacgcagctgcactggctgcatcgctggatccatatcgtgtgctggcccgtggctatgcccttgtgaccgatacaaaagggaaggtctgcaccgtggagcagctgcagccggagcagctcatctgtgtgcgcagtcggcaatatcaggcacgatgccgtgtggaaactgtggaggagatcaatgagagcacccaaaagctttgaagaaggaatggatcggctgaacgcgatccttgcacagatgcagcaggaggacacctcgctggcagattccgtcaagctgtatgcggaagccgcctccctgatgcagtactgccatgcaacgttggaaaaaacctcgctgcagatcgaggaaatcagtgcaaagatcgccgagaccgtggacaccccgcaggagcaggaggaagaataatggaatataaggcgcaatatcaggaatatctgcggcaggctacggctgcgctggatgctgccagcgctcgttttctgcccgaggaatcagaagtatgcagggctgctcgttacagcttgctgggcggtggaaagcgcatccgcgcgattctgacgctcagtgtctgcgatatgctgggcggcgagatgcaggttgccgcacagttcgcggcagctgtggagatgctgcattgctactcgttgatccatgatgatctgccctgcatggacaacgatgatctgcgccggggacgtccctcttgccataaggccttcagcgagtccacggcaatgctggccggtgacgtgctgctgaccgaggcttttgaggtgattgcaaacgcctccgctacgccgcagatctgcgtggcagccgcccgtgcactgggcgcgggtgcaggcagccgcggcatggtctacgggcaggagctggatctgaaatatgaagcactagcggccaccgaggagcagctgcgccttattcaccgcaacaagactggtgcactgatcaatgccgccgtccagatgggcgctgccgcagccggtgcaacaccgcagcagtgcaagatactggcctcctacgcatacgggctggggttggtgttccagatcgtggacgatgtgctggacgttaccagcaccccagaacagctgggcaaacccatcggcagcgacagcgaaaacggcaagaccacttttgttaccctgtatggaaccgacggcgcaatggtgctggcgcaaaagctgaacgagcagatctgcaatgatctgcagcagcattttggtgcaaaggcagcttttttgcagcagctggctcagcagcttctggtgcgcaaaaactaaagaaaaaggaatacagatatgcagtttattcaaaatatcttatcagccaatcagatcttgaccgcatcgcttcttagctggttcattgcacaggtgctaaagaccatcatcaactttattctgctgggtaagttccagttagagcggatgtggggcgatggtggtatgcccagcgcacacagcgcgaccgtctgcgccatggctattgttaccggacgcagcgccggggtttcctcgccgatttttgcggtggcctgtgtggtggctatcatcaccatgcacgatgccatgggcgtccggcacgagaccggtgaacaggcaaaggtgctgaaccagatgattgcccagtggatcgatgtaagcgagaaaaacgctccctttttgcagaatatgcacctgaaggaaatggtcggccacacgccgctgcaagtcgtggcgggcgtactgctcggctccctggtaggctttctgttcccggtcgtgtaaaaggcagcagagatgcccaaagtacaaacgcataaaggacgtgtgaatatggaatcgttgttgctggacaagatcgatcagcccagcgatcttaaaaagctgaatgcgcagcaggtggaaaaactttgcgcagagatacggcattttttgctggaaaacatctccaagacaggtggccatctggcctctaatcttggcaccgtagagctgaccgtggcgctgcaccgtgtgctggaaacgcctaaggataagatcgtttttgatgtggggcatcagtgctacacccacaaactgcttaccggacgccggaaacagtttgaccatttgcggcagctggatggcatttccggctttccaaatcctcacgaaagtgtgcacgatgcctttattgccggacacggcaatacggcgctttcactcgctattggtatggcttgggccaaaaagatcaagcatgagcccgggcttgtggtggcggtgatcggcgatggcgcttttaccggcggcatggtgtatgaggggatgaacaatatcggcgggctggacaacctgctcgtgatcttgaacgataacaagatgtccatctctaaaaatgtcggtgcactggcacggtatctgacccatctgcgcacaactacggcgtattatgatgccaaggataatgtacgcagttttctggacggtgtgccattgattggtacgccgatgaaaaagtctctgatcggcgcaaaaacgctggtacgccgcgctatgtaccactccactatgtttgaggatatgggctttgaatacatcggcccggtggatggccacaacgtggaggagctggaacgcaccttgcgctcgatctaccagcggccgggtccccattttttgcatattgtgaccaaaaagggtaaaggttatcagccggcagagatgaacccaggaaactatcacggtgtatctgcttttgacccggacggaatgccggacccggaggttgcgccgaaggaatccttctccactgttttcggcaaactgctggtgcaggagggaacacaaaacccgaagctctgcgcaatcaccgctgccatgaagtacggtaccggactgcaattctttgcccatcgtcacccgcagcgcttttttgatgtgggcatggcggagcagcatgctgtcacctttgcggccggtcttgccagtcagggaatgctgccggtggtgtgcatctactccaccttcctgcagcgctcctatgaccagatcatccacgatgtcaacctgttgaaggagaatgtggtctttgccatcgaccgcgccggctttgtccctgcagacggcgagacccatcagggcatctatgatgcagccttcctcagccagatcggcatcccggtctatgcaccctccaattacgaggaactgcaatactggctgcactatttgctgcaggacacggtctccggccctcgagccatccgctacccccgcggcggcgagagtgcaaaactggcgcagtatccctgcacaaagcgggaatacgactttttgtatgaaacgcccggggcagagattcttctggtcagctatgcggacgaactggaggacatattggaggccgccaatcaattgaacgctgcatcgcagaatgcagacgttctgaggcttgtaaagctatacccctttacagataaacttatcgatactgtgtcgaaatataaaatcgtactgtttgcagaagaatgtgttgcagctggtggtattggtgaacatctggcatatgctttgcagcaaaaaggctggaacggccgctttttacactgcgctgtccacacggcctgcctgccgcacgcgactgttccgcagatcaagcagtgcaccggtctggacgctgcggatcttgtgcaggcagtccggtctgccctcacgaaaggagaaaacgagctgtgaaaattcggttggatcaatatcttgtgcagaacggccttgtgcagagccgggagcgcgccaaggctctgatcatggccggtgtggtttttgtcaaccagcaaaaggtggacaaggccggcgagatgatcaaggaggacgctgtggtcgaggttcgcggccacgatatcggctatgtcagccgcggcggcttaaagctggaaaaggccatgaagtgcttcccgcttacccccaacggcaaggtctgcatggacatcggtgcatctaccggcggctttaccgactgtatgctgcaaaatggtgccgtgaaggtgtatgccgtagatgttggctacggtcagctggcatggagcctgcggacggatgcgcgcgtggtgaatatggagcgcacgaacatccgctatgtcacgccggaggatcttgcagagcccattgaatttttcagtgtggatgtttcctttatttctctgcatcacatcttcccggtggcacagcgcatcaccaccccggacgccatgggcgtctgtctggtgaagccgcagttcgaggcaggccgcgagaaggtaggcaaaaacggcgtggtgcgtgaccctgccgtgcatcgtgaggtgttgcacaatgccatgtcttatgctgcggaaaacggctttgtagtgcgcgggttggattacagcccggtcaaagggccggaaggcaatatcgagtacctgatgtttgtgcagaagagcgaccagcccgcagtgctggacgacgaagccgccgcacaggtggtggcagcaagccacaccacgctggatcgctgagacttcaactgtcagcaaaggagaaaccggtatgacgatctacatttcgcccaatccgggcaagacctctgccagcgaaatcgcgctgcgtgcggcgcagatcctgctgacccacggcgcagctgtactgatgagcgatgctctgcgggaaagctgcaacacggcaggggtcatttacctgccgctggagcggtgtctgaagcgtgctgacgtgatcctgaccattggcggggacggtaccatcttgcacgaagcgaatctttcgctccggtacgcaaagcccatcctcggcatcaatctgggacgctgcggctttctggctacctgcgagatcggcgaaatggaaacaaagctggccgctgtggcgcggggcgatttccagctggacaaccggatgcttttatacgcccgggtgcttggtcaggacggctgggagggccacgccctcaatgatgtggtcgtgaccaagggacgcctgcaacaggccatcgacttcagcatttactgcgatgatattctggtagagcactaccggggcgatggcgttatcgtggcgacccccaccggctctacggcctactcgctggcagccggcggcccgattctggattctcagaccaagggcgtcgtggtgacccccatctgtccccacagtctggccagtccggccatggtatttgcgcaggagcgcaaactgaacgtctgtgtggggcaggtagcagacgatgaagtatttatcagctgtgacggcggtacgggctaccccctcaaggcgggtgccaccgcagagatccgcctgtccgatcagaacgtcaagcttattacctttgggcgggcagaccagtttcaggccattgaccagaaactgcgcaaaagacaataacacgggaggcgatttttaagatggcacgcagccgcaaagaagatacaaaaacaaaagcggaacgtttgcagacgatcctacgtcttgtgcaggagcatcccatcagccgacaggaggtgctgctggagcacctgcggaacgaaggctttgaggtaacgcaggccaccgtttcccgcgatatccgggagctgtgccttgtaaaggcagccaccaccgagggctaccgctatgtttccagccggaacgaaagcttcaatcccaagactcaagggcgctttgagaccatcttccacgagtccgttctgggggtagattacgccggacatgttgtgttggtaaaatgctattccggcatggccaatgctgcctgcgaggtttttgacgctttacagtggaaaaacgttgtcggtactctttccggtgatgacacctttttaattgttgcgcgctcggagcgcgatgctaaaaccatttgttcggagctgacccgttatgtggggcagagatgacggtaggagaacgaagccatgctgagcagcctgcaaattgaaaatgttgccgtgatccagaaggcagaggtgcactttgaaccggggctgaatgtgctgaccggcgagaccggtgcgggcaaatccatcttgatcgactccatcaatgcgatccttggcaaccgcacctctaaggacttggtgcgtaccggggctgcaaaggcggtgatccgcgccgcctttgagcaggtgccgcctgctgtgctggataagctggagcagtccggctacgagcgctccgaagcactgctgctcagccgtgagatcaccgccgagggcaagagcagctgccgcatcaacggaatgccggctacggcagccgttctgcgggagctgtgcggcggtctgatcaacatcaacggccagcacgattcggtgggtctgctcaacccggcgcatcatctgggcattttggacgattatgcgcaaaaccgcactgtttttcaggagtactatgccctgtaccgggagctggtgcgggtcaagcgggagctggatgccctgatcactgacgaggccgaaaagcagcgcaagatcgacctgttgcagtatcaggtgcaggagatcgaggatgccgggctgactgccggtgaggagcaggcgctggaaaaccgccggaaagtgctgtccaatgcgtctgccatccgggatcgtctggcgcagagctatgcgctactttccggcagtgatgatgccgcaggcgctgtggatcttctgggggaagcctccaacgcggtggatgccgctgcgcagttagaccctgcgcttacagccgccgccgggcagctgctggacttatactataacgccaaggatgtggccgcagatctgatcgggcggctggacacctacgacaccaacgatgcagaactggacgaggtggagcagcgactggatcttttgtaccgactgaagcgcaaatacggcagcacagtggaggacgtgatcgctttcgggcaaaaggcccgggaagagctggataacattcagcattcccagcagcgctatgatgcattgcaggcagaaaagctgcgtctttacacaaaagcgcgggaaaaggcagaggttctgacccagacccgactgaaggcctttgaggaactgaacacccgcatttccggcacgctggactttttgaatatgccgggtgtacgtatgaccttgcggcatacccgcggtccgctggccagccatggacaggacagcgttgaattctacatctcaacaaaccccggtgaagcacccaagccgctggccaagatcgcatccggcggcgagctgagtcgcatcacccttgcaatcaagaatgcaatggccgataaggacgccgtgcctaccgtgatctacgatgaaatcgacagcggtgtgtccggcaaggctgccggacgcatcggcgaggtgctgcgtcagagtgcgcaagggcatcagatcctgtgcatcacccatacggcgcagattgcagcactggctgattgtcatctgctcatccagaaaaatgtgtccaacgagcgcacctataccgagatccatccgttggatgaaaatggccgtgtagaggccttggcgcgcctcatctccggcgaccacgttaccgagctttcccgcgccaatgcacgggaaatgctgcaggagcgcaagcacggcggatgatgcagcggaatgcatttttgcagaaaggacagctcttgacaaggcggcggtcttgtgatagagtagacaatgttaatggcgatgaagggaacaagtaccctgaagtgttctgtccagagaagtcccggttggtgcaagggatcacagaacggcaggggaaatacctcccggagccgcaggctgaatgcgtaaggctagtaggctgtgccgcgtgcgagcgttaaagacgcaggagtgtcgctctactctggggtgcgcactcgtaaggccgtttccgtgaggaaacggcaaacagaggtggtaccgcgaagttatatcgccctctgccaaattcatttttggcagagggcgttttttgtttcctctgccccaaaaacaggaggttttttccatgacgctgtacgaagaactgaaagcccgtggtctggtagcccagatcaccgatgaggagatcattgacctgatcaacaacggcaaggctactttttacatcggctttgactgcactgccgacagcctgactgccggccattttctggcgctgaccctgatgaagcgcctgcagctggctggcaacaagcccatcgccctgattggcggcggcactaccatgatcggcgacccctccggccgcaccgatatgcgcaagatgctgaccaaggacgatatcgcccataatgcggcttgctttaagaagcagatggagaagttcatcgatttctccgagggcaaggctctgatgctgaacaacgccgactggctgttggacctgaactatgttgagctgctgcgcgaggtgggcgcctgtttctccgtgaacaatatgctgcgcgccgagtgctataagcagcgcatggagaagggcctgtccttcctggaattcaactacatgatcatgcagagctacgacttctactacatgttccagcactacggctgcaatatgcagtttggcggcgacgaccagtggagcaatatgctgggtggcaccgagctgatccgccgcaagctgggtaaggatgcctacgctatgaccgtgaccttgctgaccgactctcagggcaagaagatgggcaagaccgccggcaacgctgtctggctggaccccaacaagaccagtcccttcgagttctaccagtactggcgcaatgtgggcgatgccgatgtgatgaagtgcatccgtatgctcaccttcctgccgctggagcagatcgacgagatgagcacttggcaggatcagcgcctgaacgaggccaaggagattcttgcctacgagatgaccagcatggtgcatggcaaggaagaggccgaaaaggctcagaatgctgcccgcgcactgttcagtggcaacgcaatggataccgagcacatgcccagcacccagctgaccgaggctgatctgacggacggtgccatcggcattctgaccctgatggtcaaggccggtctggctgcttccaacggcgaggctcgccgtctggtagtacagggcggtgtgttggcagacggcgaaaaagtcgctgctcccactgtcagctttaccgcagaacagttggccaagggcatcgtcattaagaagggcaaaaagatctaccacaaggtaacgctgtaaaaagcattataaaatttatgggccagaaacgtccgtaggcgtttctggcccattttttacattttagcgcgcaacagctgctgtccggcagtcacccggccggagagcaaaggctctatccgtgcaaaccggctgctgttggtcacgatcacgggggtggtcagcgtgtagcctgccgctgcaatggcctgcatatcgaaccggaagagcagctggcccttctgcacatggtctccagtctgtacaaatagctcatagcccttacccttcagctccacggtgtccatgccaacatgaatgagtacctccatgccgttgtcgcacagcaaactgatggcatgatgggtcttggcgatctttttcacgatgccgtctgcgggtgctaccacctcgccgcagctgggctcaatagcgcagcccttgcccagcacctcactggagaacacagggtccttgatccgggtcagtgcgcggatacgtcctgagaccggtgcatagagcaactgcccgctgtccgcaggcgcagcttccattgctgggtcatcaggggcaaatagcgcacttttctcaaaatgtgccagcagtcgctgccggatgctgtgcataagagtagcaggttctttcattccgtttttccttctttcggcagaggagccgccgtggcggtgtttttcttgtctctacgcatttcgcaaaaacagggccgaaagggaagctgtcccctcggccccggcttatgcttttacagctcgtatgcctttttcagtgcctcataggcggcgtcctcgttttccgcgtggacgagcagagaaatatccagatcgctggtggtgatcagcagcacctcaataccggccatagccagcgcattcagcgcccgcgcagccacaccgcagctggtgaccatatcctcgccgaacaggttcagcttggagtaacccacactgatcagaggagaagccttggcgtccttatccagatttgctgccgagattgctttcatcaccagcggcaaatcgctgctggatgcggtaaagctaaaatcaatggtggtgccgtggggagcgctctggctgatcatatccaccaccacgccggtctctgcaaagatatccagataccgggacagactgttgccccggaacactacgtcctgcacgctgatcatcatcaggtcggtctcgatattgatcttcgatactccgtacataaaaagtcctccgttctgcccgggttgccggacaacgctcaatcatttcacatttttatgtaagtgctaaaaaggatgcactgatattattttgcgcgattttttgtatcctgtcaaggctgaaatcagaataatttgcccgcacaccatgcgctgccgccaattcctgcgtgtaatcgcgcaaaaggtaggtgcgcacattggtttttccggcatcataatgggtcacggtggggtgcagctgcggcgcaagcacttcacactgcaccgagccgttcggctgggtggtcttttgcagctgcaaggtcaggatcgcacccaccaactgatccgggtggctctgggtgctgaggaaattgcccagcgagaaggcgacaaagcttctccgcccgtccgctgcggtcagccactgggcatcctgcagcacatgcggatgggtgcccacgatgacatctgcgccccagtctgccagattctgcgccagtgtgcgctgactgtccacgacggcgtggctgttctctacgccccagtgcactcccaccaccacaaaatctgcctgctgacgcgccaagcgcacctgatgctcgatcacattggtctggctggtgtagatgacattggctgtcatattcttattctggcggataccgttggtgtgttcagtataggagagataggcgatggtcacaccgttgacggtttgcagtgggatgcggtcgtagtcctcttcgccgcaccacagaccggtggtgactacatcctccggcatggactcccagaattgctgagtagccgcaatgccggacgcgcccttatcataggtgtggttattggataggctgaacacccgcaccccggcacggtacagcgcccgcgcacagtcgccgggggtggaaaagcatgggtaggtggagggtgcaagagtgtcactgcaaagggtctcctgattgatccagttcacatcctgttccgcatagaaaggagcaatgtgctcatagcagtaatcaaagctgtactttccgtcttcgcctgcccggcgggcggcctgattataaatgggagaatggatcaggttatctcctgttgcggaaaaacggatggtttccaccacaggctgcggttcaggttccggctccggggtcgcaatggatgaagcaggggataacacatcctccggcggctcgacgccgcccaccggtacatcttctcccggcagccttgtccagatccccagacacaatgctatcacgctcacagccagaaccgacagcaccaccgcctggagcgtttgtttttggccgcgcttacgggcagccggacgccgccgctttaaaggctcctgcttcatcgttcacctcttctcccagcgtatgccggggcagcttgtttttcagagggcggcgatcaggtcgcccatatcgtacagacccggctctttttttgccagatagaccgcagcatttactgcaccgttggcaaagatgctgcgggaataggcggtatgccgcagggtgatcacctcgtccgggccgcagaacagcacctcgtggtcgcccacgatgctgccgccgcgcacagagctgatgccgatttccttcgggtcacgcttctggcgcacggaggagcggtcgtacacataatggtacgcgccgttattttcctcgttgatggcgtcggccagcatcagtgccgttccgctgggggcatccagcttgttgtggtgatgctgctccacgatctcgatatcatagttgatacccagcacagcagaggctcgcttgcacagctctgccagtacattgatgcccatggacatattggcgctcttgaacaccggaacactgcgggacagctgcactaccttcagctgcagctcctccgaaaggccggtggtgcacaccacgatgggcagcttgtgggtctggcagtagggcagtgccttttccactgcggcaggggaactgaagtcgatgatcacatcgcccttgccgttcagcttttccagactgtcgtagaccggaatgccattttgctcgccgtccttcatatcaataccggccaccacacagcagtcctcccgctgtgcaatcatatcgcacagcacatggcccatgcggccgccaataccctgaatcacgatctctgtcattgttgtttcctcatttctataatatggcagaatgcccggaagctgaagatcccgggcattctgtacgctgttgttattccttgatcagacctgcagcctgcagagcctgctcgatctttgccttgtgggcatcgctgggctctaccagcggcagacggcattcgcctgcgttccagcccagcacgttcatggcatacttgaccggaatggggttcacctcgcagaacagagcctcctccagcggcagcatttccagctgcaaagcgcaggccttggcggtatctctgtcaaagaaagcctgacagcagttatgcaccagttccggcgcaacattggacaccacgctgatgacacccttgccgcccagtgccagcaggggaaccacctgatcgtcgttaccggagtagatgttcagcgcatcaccgcacagtgcagcaactctggccacctgagagatgttgccggaggcctccttgatgccgttgatgagcgggtgcttgctcagctccagagcagtctcgggtgcaatgttcagacccgtgcgggagggtacattgtacaggatgaccgggatgccgccggcctcagccatggcggtaaagtgcgccaccagaccggcctgcgaggtcttgttgtagtagggggtgaccatcagcagggcatcggcaccgcaggcggcagactttgctgccagtgcgcagccgtggtcggtatcgttcgaaccggcaccggcaatgaccggtacgcggtgattgaccgtatccacggtgaacttgatggcggccagctgctcctcatcggtcatggtagaacactcgccggtggtgccgcagatgatgatggcatcggtgtggcgggcgatctgatcctcgataatgcggcccaactcgtcaaagttgatgcttccgtcctcgtacatcggggtgatgatggcaacacccgcaccggtaaagacaggcttcttcatagtaaaaaactcctttgctgcgtgtatcgcgcaaaaattcaggcattagtccatatagccctttgctgccagcagctcggccagcagcacagcaccgccggcagcaccgcgcagggtgttgtggctcatgcaggcaaacttgtaatcaaacagggtgtcctcccgcagacggccgatgcacactgccataccgttttcggtgttgcgatccagcttgggctgcggacgatccggctcagtaaagtagtgcaggaactgcttgggagcgctgggcaggttcagttcctgtgcagggccgcggaagttcgcccaagcttccaacatctgctccttggtgggctttttgtcaaagcttacgaacacggctgcggtgtggccgtccgaaacaggcacacggaagcactgtgcagtgatgaccggcttctcggcattgacgatctggtcgccctcaatgtggccccacagcttcagcggctcgcgctcgctcttttcctcctcgccaccgatgtaggggatcacgttgtccacgatctcaggcatccggtcaaaggtcttaccagcgccggaaatggcctgataggtgcacaccagtgccttactcacgccaaagtccttcatcaggggatgaagggcgggcacatagctctgcaggctgcaattggacttgaccgcgatgaatccgcgcttggtgcccagacgcttgcgctgggcagggatgatctcgatatggtcggcgttgatctcgggaaccaccatgggaacgtccggggtgaaacgatgggcactgttgttggagaccaccgggcactctgccttggcgtatgcttcctccagtgctttgatctcgtccttgggcatattgacagcgcagaaaacaaaatccacctgcgaagcaacttcctctaccttggaagcgtccaaaacggtcatcttcttcacgctctccggcatgggagtagtcatggcccagcgggagcccactgcatactcatagcttttgcccgcactgcggccggatgcagccagcacggtcagcttgaaccagggatgattctccagcagagtcacaaaacgctgacccaccataccagttgcgcctacgatacccactttatactgtctatccatttccagcacctttcctttcaaaaaaacaaacagcaaatcttatcattgtgcacaacacggcttgcaaaccggacagcaatgcaatataatagatactgtttatacagattctataatatcattgatacgttgtccgtgtcaatcatcggaaaggcaaatgcacagtatgttaaaaaaagatttttggtacgatttacccaaagagctcattgcacaggaacctgcgtccccgcgggatgcggcacggctgatggttctgagccaaaaggacgacagcattcagcacaaggtattccgcgacctgccggaatttctggagccgggagatcttttagtagtgaataattccaaggtgctgcccgcccgcatcgtgggcgtcaagcagcctaccggtgccgtgtgcgagctgctgctgctgcggcaggtgaagggagaccagtgggagtgcctggcaaagcccggcaagcggatgcagcccggcacgaaggtaagctttggtgacggcagcctgaccgctgtggtggacgagactatggaggacggcaacaagtacgttacattctattatgataccgaaacgctttatgaaaagctggatgaatttggcaagatgccgctgccgccctacatcacaaagcagctggaggatcagagccagtaccagaccgtctatgccaaggagctgggcagcgcagctgctcccaccgccgggctgcactttaccccggagctgatggataccatccgcgccatgggggtcggcattgccgaggtcaccctgcacgttggtctgggcaccttccgacctgtgcaggaggacgagatctccgaccataagatgcacagcgagtggtactccatcagcgaggagaccgcccggcgcatccgcgagaccaaggccgcaggccaccgggtcatcgctgtgggcactaccagctgccgcacactggaggctgccgctgccaagtacggcgagatcaaggcttgcagcggcaacacctccatcttcctgtacccgggggtgaagttcaactgcatcgacggtctgatcaccaacttccatctgccggagagcaccctgatcatgttggtgtccgccctgtacggctacgaaaagaccatgcacgcctatgaggtagctgtggcagagaagtaccgtttcttctcctttggcgatgcgatgctgatagtctgatgcaaaattcgcgctttttgcgatatttgtatgtgaaaggtaaggatgcgatctgcatccgccgctccccttacaattacggcagaccgctgctgtgatcattctgataacttgcaggctcgtggcctgcatcgaggctgcacggctgttttccgtgcgcagaaaggaacgaataatcatgccttctttgacgacctacaccctgctcaagcaggagcacaacgcccggcggggcgagttcaaaaccgtgcacggcacggtgcagacccctgccttccagaacgttgctaccgccggtgccatcaagggcggcctgtcggcgcaggatctgaaggatatcggcgcgcaggtcatgctgtgcaatacctaccatctgcatctgcgtcccggcgacaagctggtagcggatatgggcggcctgcacaagtttacccgctggaacgggcctatcctgaccgacagcggcggatttcaggtgttcagtctggcaaagctgcgcaagatcaccgaggagggcgtgaccttcgcctcccatctggacgggcaccgcatctttatggggcccgaggagagtatgcagattcaggcaaatctgggctctaccatcgccatggcctttgatgagtgcgtagagaaccccgcccagcacgattactccaaggacagctgcgaacgcaccacccgctggctgaagcgctgcaaggccgaaatggcacgcctgaagcacgagggtatctcggtcaacccggatcagcttctgttcggcatcaatcagggctgtacctatgcagacctgcgcgtggagcacatgaagcagattgcagagctggagttggacggctacgccatcggcggtctggctgtgggtgagcccaccgaggtgatgtatgagatgatcagtcaggtggaaccgcacatgcccaaggacaagatccgctatctgatgggcgtcggcacacccggcaacatcatcgaggccgtagcacgcggtgtagacttgtttgactgcgttatgcccagccgcaatgcccgccacggccacctgaatacatggagcggcatcattaacatcaaaaatgccaagtacgagcgggacgagcgtcccattgaccccgcctgcggctgcccggtgtgccgcaactattcccgcgcctacatccggcacctgctcaaggcagatgagatgttgggtatgcgcctgaccgtgatgcacaatctgtggttctacaatcatctgatggaacgtatccgggacgaactggatgccggcacctttaccgccttccatgacagatacgttaaacttctggatacccgaatttaaactttagccttgcaacaaggctgataagagggtataatagcattatctgaatttttgagaggagattttgccccatgcaatttctgactaccacgtccgaaggctatatcagcctgttcttcacgctggcactgatgctggtcctgctgtacttcatgatctaccgtcctcagaagaagcaggaaaagaaggatgccgctatgcgcagcagtctggagatcggcgatcaggtcaccaccatcggtggtgtcattggccgcgttgtcgccatcaaggatgacacctttgttctggagaccggcgctgaccgcgtgaagatccgcttcaccaagtctgcgatctcttcggtcgaaaagctgaacatggacaaggctcctgccgacaagaagtaagcgtttacaccgtgcatacatgaaccgcctccctgcatagactatgtgcagggaggcggttttgttatgtctgagtctcgaggtttcccggcggagcttctttcgtttctgcttttcggggtgctgggggtagctgtaacggcggcagctttggcatgttttgcgcagctgatggcagggcagggctgctccggcagtgtagtgccgatacttgccacaacagccgtgtgcatgggcagcctgctgtgtgcactgacggcagcgtttcgtaaaaaggcgcgcggtctgctgaccggactgctccaaagtacatttctggcagtgccgctggcgctttctgctatatggaacggcacagccgctgagcctgctgtggtatgccgccttctggcggtgctactctgcggttgcattggtgggcttcttggagtcaccctgcgcagtcgcagacacacgcttcgttgatcgatccggcaaatcgaatccatcagagggagaaaacagcgtatgtggatctatgaacagacaaaatcagaagaaaacttttctttgctgccgcagacggtcggcctaccggttcaaacagcagagtctgccctgtcgcccgcgccggcacaggcagctgaaccggcagaacaattgacgcaaaaagagccctgcatcccggcaaagcgccacgccacccaggattgctggctgctggctgcggcgtttctgctggggtgtacggcagccggtgtgttacaggccgtatgcgatgcccggcaggcagagctattgcggtattatctggaagcgtggcaagggctgtttacaccgagcggtatgcagggggctgtacagcttttcggcatggaatacctgacactcggccttgtggtcagcctgtttctgtcactgggactttctgcccttggcccagtaatgatctttggcaatatgatgttgtacggcttgggcagcgggctgcttatggtacagctttgcgccgcaggcgggtggaaagcaatacttccggcactgctatggacaggcttaccggcggcagcagcaagtggttgtctgtgcttttttggtgcctgcgctttgcaggtcagcagccgaatccacgcatattctttccgcaagcatcccggcggacaagcccgccccggggtgcaggcactgctggggcagtatctgctgaccatggtggtgctgctgccgctttgcggtgcagcagcagggctttcgtatcttggcagtcgcctgtgaacagcatccttttcttgcgggttttggcacagtgtgttacaataacaaaagaccataataaatgagggacagacatgaaattgaaatccgtttatgtatgctccaattgcggagagacaagcccccgctggatggggcgctgccccagctgcggcagctggaataccatgaacgaggatgttgttgctgaagcgccaaaggcggggactcctgccgcccgtcaggctgccgcggctcgtcaggagggcgtgaccaccctgaccgcccggcggctgtcagagatcagcaccacggaggaaaaaagccgcatcctgaccggtatctcggagctggaccgcgtattgggcggcggcatcgtgctgggcggcgtggtgcttttgagcggtgagccgggcgtgggtaaatccactatgctgttacagctgtgcggcgccatctccaaccagcacagcgtattgtatatcaccggcgaggagtctgtccggcaggtcaagctgcgtgcagcgcggctgaaggtaccgcaggataacatctttctggcggcggaaaatgacgtggatgagatctgcggtctgatcgaaaaagaaaagccggaccttgtggtcatcgactccatccagaccatgcgctgcatggatatctcgtcctcgtccggcacggtcagtcaggtgaaggagagtgccgcccggctgctggcggtagccaaaaagcaggagattcccatgtttatcgtgggtcatgtgaacaaggacggcgcaattgcaggccccaaggtcatggaacatatcgtggatacggtgctctactttgagggcgacaagatgctgccgtaccgcattctgcgggcagccaaaaaccgctatggctccaccaatgagctgggaatgttcgatatgaccggcacaggacttgccgaaatcgaaaatccctcccagatgctgctggaaggacgtccgctgggggtttccggcaactgtgtggcctgtaccatggagggcagtcgtcccatcctgagcgagatacaggcacttgccaccaagacgaattttccggcaccccgtcgcgcctgcagcggatacgactataaccgcatgaaccttttgatcgccgtgctggaaaagcgggcagggtacttctttggcaatctggatgtctatgtcaatatcgtgggcggcattgcactgcgggataccgcctgcgaccttgcagtctgcctgagcatggtctcctcgctgctggaccgcccggtcagcgataagcttatcgccattggtgaggtaggtctgggcggggaagtgcgcagtgtgcccaatctggaacagcgcctgcacgaggctgagcgtatcggctttgagcgggctgttatccccaagcacagccttgcacacctgaatgccgcagattatcccggcatgaagctggtcggtgcagcgtatatcgcagatgccatcaatgcgctaaaaaatgactgcctgtgatgaaacgaggaacctatgtcgatttatctggacgaaagaaaccccggcaagcacgcgccctttgaggatgctgccccggatattgtggaatatgtacgttatcttgaagtaatcgccggcaaaagcgccaatacggcgttcagttattactgtgacctacgctccttcagccgctttatgaagcgccgccgcgggcttgtggccacagatgcagaatttaaggagatcgatcccaaagggctggatacagccttctggggcagcataacaaaagaggatatctacgaatatctgtattttctgaaccgggagtgcggcaacaaaaaatcctctaccgcccggcggctggccagtctgcacggtttttatgattatctggtcaatcaggtcaaccgcttatccgaggaccctacggcggccatccgcccgcccaaacaggataaggtcttgcccaagtacctgacggcagagcaatccatctcgcttttggagagcacccagacccagagtgatttcccggagcgggattattgcatggtggtgctgtttctcaactgcggtatgcgtcttgcggaactggtaggcatgaaccttggagacatcgatttagagcagcgtcagatccgcctgttcggcaaaggccataaagagcgcatggtctacctgaatgatgcctgcgtggaggcactgcaactatatctgcgcaagcgcaacaccatggagggactttcacccaaggaaaaagcggtgtttattacccgtatgcgcaaggaacgtatttcgaaccgcagggtagaacagctgatctccggtgcaatgaaggctgcggggctgaagggcttttccacccataagttgcgccatactgccgctacgttgatgtatcagaccggcaatgtggatatccttaccctcaagcagcttctggggcacagcagtgtgggaacaacacaaatttatacgcacctgcaagaatttcaggtgcgctctgccattgaggaaaacccgctgggcaaggtactacccatcaaagctgcaaaagcaagcttggatacaacagatgcagcaggggagacatctgttgaaaatgacccggcgggagaggacgcttctgagccgtccggccctatggcggcctttgagggcgttgcacaggatggcttccgggcagatatctcggcaatgtcaaacgatgaaatagacgattcatcgtgcgatacttaaacctgcacaaaacgtctgagacgattcaaagacctatggcgcgatccggcttgaccggataacgtcatgggtctttataatttacattataagcagtataagcagtcagcagcaatacatacaggagcatccatagaaacgcgcaacgtaatgtctacacaaaagcaaatgttataaagcatgcacatagatgcttactggaataaaatgaattacaaatgaaccgatgcagcagcgcataacacaggaagcatctgtacgcatgagacaaataaaatcataaaatatgataaaaattgcagaatgtgcagaacggctgaactaagcccgaaaatgagccagctgaggctggaacgccaaaaatccgggaaatgggcatttttcacttccctaagtttcgcataacgtgcattatacgaaatgcgaacaattaaaaagagaagctgcccttctctctttctgtcagattttcggcagcttctgtgtccgcttttctgtttgcacacggccgcttctacgccactggacgtattactagcatgttcaaacgtttgacttatgcctgcggtagccgttccagtgcgttacaggtcatgttataaaagcagtatcgtttcttttcctttggtgatgcgatgttcatttcaccggcagcggttctgtaccgaagtatgcacagatggcttcgtaataaatgcgtgctactgccttgcagccctgttcactgccaaaatgctccacatcctcatcgttcgtcacaaaacactgctctgccaacactgccggacaatccacatcctccagcagcgtaaagctgcgctcaggccgcacctgcgtgtaggtattctccaccagctgcttctggtcgttttccagataataaatgtaacgcactccccctcgcccgcgcagccttgcgccgatgctctgcattccaccggccagcagttttgcaaaataaaaactttcctgatgccatgtacgcccgggcactgccggatagcattcaaaaccggctgccgtagagccattggctgcggagttgccgtggatagacagcagcagctgcgggctttgggcgttggctgctgctgcacgctgggcaggcgtggcggttgcatcaaagctttcccgggtttgcagcgggatgtaattcgaatcctcttctaaccattggagcagcgcagcagccgtggctgcggtgacctgtttttcttcgaccactccccttgcgcccgggtcactgccgccatgtccggcgtccactgccacacggtacggtgggtcgcccaccacaggacgaaagtcctccgctgagactgagactgcggattctgcgggtgcgttcagttccagcgccgccctccataaaaacaggccgaagcagagcatcagtgccgcaaaaacaaacagcaaaccgtgtaaaaaccggttcctcgttttgcagcggtgcgttttacgtttgctatgtttatttactggtctgcgctgactggttggcataaagctttacttcctgttcgttttacattcctatttatataatacgagtatactcgccttttccttgcactgcaacaaaaaaagactgccaatttttcaaaaggcagtcctttggggttatttcagttctacaaccgtcacgccgctttcgccttcgccgtaacggccaagacggaagctttttaccatgcggttgccgcgcagatgcttatggatggcagtgcgcagtgcgccggtgccgttgccgtggatcagatagatcaccgtctgtccgttcaggatggcgcggtcgataaaggagtccacctccgacagcgcctcgtccaccgtaagccccagcaggttgcactccattttggcggtgcgctgtacgcgctctaccctgccgttgggacggttggtatcgccggtcaggcgggaataccgctgctgcgcctttgtcttaggcgcagtgggttcttttaccagcttttccggctgcttcaagcccttgaggggcaccttagtcttgatgataccggcacgcaccagcacatcgccgtttttatcaggcagcgccagaacggtggccagctggttcagttctgcaatgcagacctcctgtcccacttttacctccttcagcggcacaaactccttgacggggttatgcaccacctccgtaccggcaaacagcttttcggtctcctttttggcaatttcgcgggcacgctgcgccttctgctgggcgctcatgcgctcgtccttttgcagctggcgcagctcgtcggtcagtgcgtaggcctgtgtttccacctgctgtgccagcgtgcgcgccttggcacgggcggcttccaattcattctcgccctgctggatcaactcatcccgttttttgcgggcggcttccagctgatgggaagcttcgttgcgcagctgctccacttcgttctggctttccttcagctgcagcttcaggtcgtccagctgacccagaaccgcatccagacgcttatcctcggcagacagatgctgctgagccgcttcaatgacgcggctggggatgcccagtttttcgctgatcaggaatgcgttggatttgcccggtacgcccacgctcagcttataggtgggacgcagggtctccagatcaaactcgcaactggcgttgaccacacccttagtctccagtgcaaagaccttcagttccgcatagtgggtggtcgccatcagcagtacgccacggcggcgcagctcctcaatgatggcaactgccagcgcggcaccctcagcggggtcggtaccggcacccagctcgtccagcagcacaagggtgtgcggcatggcaagttccagaataccggtgatttttttcatgtggccggagaaggtggaaaggctctgctcaatgctctgctcgtcgccgatatccaccagaaattcatcaaacacacagatctcgctgcgctcgtcagcagggatcaaaaaaccgcactgtgccatagcgcacagcagaccggcggttttcagggtgaccgtcttaccgccggtgttcgggccggtgatgataagggaatcgtattccccgcccagtgcaatatccacaggaacacacttttgcgggtcgatcagcgggtggcgggcgcgaatcaggttgaaggaagaatccgtccgcacagctggtttgaaggccttcagttccagcgcaagccgcgctttcgccagcaggatgtcaatttccagcatggccttgtagctgtactggaactgcggctcaatggcggccacctgtgcggtaaaggccaccaaaatgcgctcgatctcctgtgcctcctgtgcgcggtactgcagaatgcgggcgtttgcctccaccacagcctgcggttccacgaacaccgtagcgcccgtagaggatacatcgtggatgataccgctcacttcgccgcggtattcgctcttgaccggcacaacataccggccgttgcgcatggaaaccacactctcctgcaggtatttggaggtatccatattacgcaccatgctttccagccggtcgcggatgctgttttcggtggcgcggatctttttgcgcaactctgccagcgtgcgggaggcggtatccgccatggcatccggtgccagaatggcacttgagatctgctgctcaagacccggttccggtgcaagtgcgtaaaacagatcatcggtcggcagcgcgtcatgctcagaggagccgtaccagctggtcaggtgctgaaaattgcgcagcgcaccggccaccatcagcagttcgcccatggaaagcacgccgccctttacggcacgggcggcaagctggctgaccccctctaccccgccaaagcgcggcgaaccgtttttaatcagcagggtgttgatggcgttcgtctgctctagtgcgtagcgcacctcgtccgggtcgcactgcggctcaatggccagcagcatagcacgggcttccttgcatacgcagccctccgctgcacgcgcaatgatcttatccagttctaatgtttttaagtagcttgtttccatactgttcctttttggtcagggcagcacgcttttcaaaaaggcatagcttttcagcggcttatccagatgcgtcagggcatagttttcagccactgcggaaagctttgccagactgcccacagagatcttgaatgcaaatatttttttgtcctccaccaagcagatgtggcgcagtgcaaacagcgcagccttgtccagattgcagttcttgcctgcctttgccgcacaggacgcacagagcaggtgcccttcctgtgcgtccagataaaaggcatctccttcatcgtaggtgccacagtcccggcagcagacaatctgcggcataaagccgcactcactcatggtgcgcagctcaaatactgccttgatcacccgcaggtcggtgcggtgctcgttgatcatatacagactgttcagcaccagacgcagctcccgggctgcttcctctccggtaggcgaaagcgcagcggccaattcggtaagatacatggcaaggcttaccccttcaatggaggaggaaatgccatggaagatgttctgcacatcggcttcccgcacggtatacatattgcgtccgggcaccagtgtaaactccgaatagcagaacagcccgcaggcactgaacagcttgcttttcagccgcaggctgtttgcagccattgctgtgatcacgcccagtttcggggtaagaatcgtcaaaatgcgatctgcttctctataacgggtctccttcagtaccagacccatggtcacgaatggttccatcgtccgtttctcctgccggatgctcggcgggcagctgcaccagttgtttgtaatcgagataacggagaatgttccccgtgcaggcaaaggcctgccagcttgcagcagcatccatcttcagcactccttcccttttctgtgcacaggctgcttttgttatagtgtcagcctgattctagcacagcatacaagggaaaactgtcctgctttggcatcactcagcggttggaggaattctgcttaaagccgaagttattcagcaaaaattcgttatcccgccagtcggattttaccttgacccagcactgcagattgacccggcagcccagaaactcctcgcagtcggcacgggcagcgctggcgatctttttaagcatggcaccgcccttaccgatgaccatgcccttgtggctctcccgctcgcagtagatgttcacatcaatgtcgatcaggtctgtgcccgggcgctccttgaagcgctccaccactaccgcaatgccgtgcgggatctcatctcgcataaagagcagtgccttttcgcggatgacctcagccaccaattctttttccggcatatcggtataggcgtcatcgtcaaagtaatggggaccttccacagcgtagcggctcaaagcatcgaacagttcctcgctgccttccttgttgcgcacactgatggtgtagatctcatcgaacacgcccagcgccttcagctctgccttgcgggtttccaaatcggcaggttctttaacaaggtcggtcttattaatgactgcaatggccgggccgctgcggtgcagcgcctccacaagtgccatctcagattcgttcagcgcgccgtaaggctcgaacagcatcatggaaacatccacatccgcaatggaatcgctggcagtcttatccatgcgcttgcccagcttgttgtgcgccttgtgtacaccgggggtgtccagcagcacatactgcagcggcccccgggtgatcacgccggtaatgcgggtgcgggtggtctgaggcttagaggtgacgatagccactttctcgccgaccaagagatttgtcaggctggatttgcccacgttcggccgtccgatgacagcaacgaatacagaggaggtgtcgtaatgctcctgaacgggtattgtagtactcaaagcgaactcctgtcttgtttttatgttctgttgcagtgaagggatatcattccgtgtagctgaccgtgcggggcagacccagctgcagcagcacagcctcttctttttcgcgcatacgcatggcctccagaccaccgttttcgtggtcgtagcccagcagatgcagcatggagtgaacggtcaaaaaggctacctcccgctgcagcggatgcccatacagattggcctgctccatggcgcgctccatgctgatgacgatatcgcccagcatcatgcagccgttattctcgtcgatatcgtacttgccgttctcgcccagaggaaagctcagcacatcggtgggcatgggcttattgcggtattggttgttcagctcggcaatggcagcgttgtccacaaaggtaacgctgatctcggcgggacggtcgaaatgctcatattccagcacggcattgcaggcacggcggatcagaatgcggagcccggagggcaccttgacagctttctgggagttggtgatcaaaactttattggacatatcggtccactcctttcagggatttatttaaaattcttattgttttctttattttccgcatcggcagccggatgtgcggcacgctcgtaagcctttacgatctcctgcaccaaccggtgacgcacaacgtctttatcggtaaagtagcattgtgcaatgccgttcacatccttcagcaccttcagcgcgtccaccagaccgctgcgggtgctgcccggtagatcgatctgggtcacatcgccggtaacgaccaccttagagcctacgcccatacgggtaaggaacattttcatctgctccggggtagtgttctgcgcctcgtccagaatgataaaggaatcatccagtgtgcgcccgcgcatataagccagcggggcgacctcaatgatctgcttttccaccagacgctcgtaggtctctgcgcccagcatatcaaacaggccgtcgtacagcggccgcagataggggtctaccttctgctgcaggtcaccgggcagaaagcccagcttctcccctgcctccaccgccgggcgggtcaagatgatgcgggatacctccttggccttgaaggctttcaccgccatggcaacggccagataggtcttgccggtacccgccgggccgacaccgaaggtaatggcattggagcggatggcgctcaggtattccttctgtcccagcgttttggggcggatcgggcgtcccttgaccgtgacggtaacaaagtcctcggtcagctcctttacccgcttctctgcgccatcatgcgccagactgatgcagtagtgcacagtctgatcttccagcggggtgcggttctcgatcagaagaagcattccctccacggcgcggttcgctgccgccacattggcaggctcgccggaaatgcgaagctgtgtgccgcggcagacagcggtaacagaaaactctttttccaataagcgaatattccggtcacagttgccaaaaacagccgctgcgatctctacactatccaattcaatacacttttccgccatggagctcctcccgaattgcagaatttaatgactatattgtaccaccaaaatcttcagaagaaaactatgaaaagtgcacaaaatattttcccgcgttccatcggtttttccatacgaaccgtgttttaaagctttttgatgacttttttcagaaaacgcttgacaaagtatatcgggagacgatatactttaagcgcaatatatcggctaacgatataaagacgtccgatagaatccatggagtgtttcagtatggaaaaccttgcactgaccgaatcgacctattatatcctgttgtctctttaccatccgcagcacggttatggcatcatgcagcagacggagcagctttccgggggcagagttcatcttgccgccgggacgctgtacggcgcattgacctccctgtgtgaaaaaggctggatccgtcccctgcccgctgagagcggcagccgcaaaaaggaataccagcttaccgcagagggcgtacagattttaaagcacgagcttgcccgcttgcagcagcttgtggcaaatggtgagagcatcctgaaggaggaagccttatgaaggaaaagaaaaccgttttcaagcttttctttgtgtgggattttgaaaaagaagagcgctggctgaacgagatggcacaggagggctgggtactggacaataccgggttttccttttatacttttgtgcgctgtgaaccgggcgagtatatcatccgcttggagatgaaccccagcagtgattaccgcgcctttgtaaaggaactgggtgcagaatatatcggcggctgtgtcaactgggtgtacttccgtcggaaagcggagcttggcagctttgagctgctctcagatatcgactcccgtctgacgcatctgagccgcatcaatcggatgctttccctgatctgtctggcaaacctgatcttgggcataacgaactctttgaatcaggctcgctacggctggctgaacctgttgtgcgcagcaatgctctcctatgcactggggcgtatccatggcatgaaagcagcgctggaaaaggaacgcagtttgcacgaatgatttgtcaatcccttcttcgccacaactgcagagaaaaaagcggcgtatctttggacaaaaagaccatagcaaaccgttctccatcgtgatacaatagcaagcgttgtgtgccgccgcccggcggccgtttggactgcttgaacacaaaggagaaggaaccatggaacagctttttctgatgcccggtgaagaacgatacgagcgcttcaaggatggcaacggtgttcctaaggtacactactcctaccgctctatgcgcggtgccttcttcgactgcgagagccgcagcttagaggaagcccagcgtctgtgcgaaaactggcttgtggggcaggatcgctgctaccgcaattaacataaaaccataacccccctgccgtatttgcacccttttttgcaaaacggcagggggtatttttgttatataggctttactgccacacctgcgcacagacaagttccaatacactaccggcgatgcaacgggatttatccgagatcaggaagcagttggaaagctcctcccgccgggggtcgatatccgcgatcttaaagcccggcgtaaccggatagccgctgcgcagcaatccgcgcagaatgccgggaatctgtgttgtaaccggaatctctgccccctccggggtgcggatggtggcaatggtctcacccttctctactaaatcgccgattttacgcacattcataaaaacaccggcggcctgtgcatggatcacccgctctgcaccgtacccgccaatgacgccgggaatgccggtattggggatagcgctcccctcccggatgatccggccaagccggtggccgcgcttggtttctaccacggcatctacgtcctgcccggctacaaagccggggccaagggcaatagtcaacggtgccatatcccggctggtgccaaggttgcgcttggccagaatggcatccactacgacctccggctttgcccgggcaatacaggccccctcttggtcaacgagcaccggaacagcgccctgcgcccagacggactgtgcctgttccaatgcttcaatgcggacagcgcgcagaccctcaacagtggcttcgccttcatacactgcttcacacagagctacctgacggcggatggctgcgggctgtgtcgtttccaataccagcactcgcagcccggcgctacacaaccggtggatggtaccggtggcaaggtcgccgccgccgcgcacgataattagggcgtcctttttcattttatttcctccccggagaaaagtgtctgcaatagcacctccatggagccgccacaggcagcaatggctgtgtcctcgtttttgccgtcagccgaaagctgtaagcattgcaaggcgggcacagcctgtgctaacagcttctgagccgcctgtaccgtgtaatgctccataatgccgccgcccacactgcccactatactgccatcgggcagaacgagcatttttgcgcccacatcccgcggggtggagccgtgccgcgcaataatagtagccagtaccgccggggtatgggctttttctgcctgcaccatcgcatccagcaatgcgacgggatagccctcggtctgggggcgggcatttttgacctgcacgatctgcgccagaatggaaagcgcgatctccgcagccgtctgtgcgccaatggcaaggccgatgggtgcgcagagtgcatcgatccgctggctgtccagaccgttctccaacagctgacggcgcaccaatgcggcacggcctcggctgcccatcatgcccacataggccgcaggcttttgcagaatccgggtaaggcagtccagatcaaagacgtgggagcgggtcagcactgcaaaataggtctctgccccgccgggcacaccctgaagcgcctgcgcaaagggagcgcagagcacggtatccgctccggcggcgcgcagctgctgagcaaattcctcccgatcatctatggcaagcactggtatgccgagaagctttgcctgctttacaagggcagcagcaacatgaccgccgccgcagaccaccagctgcggcaccgcaccaaagcgctcagcaaatacccgctgaccttccagtgtaagaaagcccgtagcggtacaggcctgcaggacggcaagctgacgctgcaaaagttcggcactctgggtctgccacagggcgtctccgtcccgcagcagcagctgactgcctgcctctgcgccttccagcacggtagccagcgtatagctgccggtctggtttgtactttgcagaacgtctgcaagcgtttgtctgttcattggtgtttctctcccttaattattgctccacaggtgttaccttatcaaactgtgtctgatccagttctgcctgccagctttgccagtcctccggcagcatacgccatgcaagcccgcaccctgccgagatctcacgcggcagcgggatcagccgcccgggcacctgccgggcattgcattgcttttcccactccatagcctctaaggtggtgcggaaggaaagcacgatatagcttcgttttactcgcataaaatctcccgggcaagtgcacagactgcctgcgctgcctgctgtacctcctgctccgtattgaaatgggaaaagctgaaccgtaccacgccctgctcggccgtgccaagggccttgtgcatcagcggagcacagtgcgctccggcacgcacgcagatgccgtagtcctcccacaagatatctgccacccgggcagaatcctcctgtgcgatgttcagcgccacaatgggcgcacgggactgcatagccatatcaccatacaccgttacgcccggcgcagtacgcacctgctcataaaacaggcgggcaagggcggcttcccgggcagcaaggttttctacgccctgttccaacagccaacgcaccccggcacacagtcctgcaaggccgtgcacgttcagtgtgcccgcctccagtgcggtgggcatctgcaaggggtgcgtttcatcaaagctatgcacgccgctgccgcccacaaggagcggcgcaacgcgcaggctggggcgcacataagctccgccggtgccctgcggccccagaagtgccttgtggccggtaaagcagagggcatcaatgcccagctgctgtacatcaatgggctgcgcaccggcagtctgggctgcatccacgatcagcagcagaccgtgctggtgggcaaaatccgctgcgcgggcaaggtcgatgccattgccggtcacgttggaagcccctgtcaccaccagtgccagagtcgtgggacgcagcagcgtttcccactggtcgtaacaaagctgtgcagccgcatccaccccggtaaaagagacctctaccccctgtgcccgcagccggtacagcgggcgcagaacggagttatgctcgcataccgttgtgatgacatggtcgcccggatgcagcacaccgttcagcaccgtgttcaacgccatggtcgcattggcggcaaaaaagatgcaggaagggtccggcacatggaaaagttctgccagcgccagacgggtgtccagcacgatccgtgcggcgtgaagggtgggctcgtgtgcgccgcgcccggggttgcctgccgtgtgcagtgcctccagaatagcctgttccacctgcggcggtttatgcagagtggtggccgcgttatccagatagatcacggttttaccacgtttccggcctgcgtcagcttttcggcaatggtgtacatattggtcacgctgcccacagccagcttctcggtaaggccgtaaaagttcagacaggtaccgcaggtcaggatctctacgccctgtgcttccagcgccttgagatcttccagcatggcagagccttcacaggttagcgctgcgccgccgttatagaacagaatggtcttaggcagcttatcctgctgggtcagcgcaaatacaaaggccttgagcagggtcttgcccagttcctcgctgccatcgcccataacggcagcggaaatagccaccaccgtatcggtgcgggcatcgggggtgcagacaggagcatcttctgctggggcgcttactacttcgcccagcgtgaacagcacacggtatttgcgctcttccagcttttcagcgctgtactgatatcccttctgctgtgccatcttggtcaggttttgcacagcgatctcgttgtccacaagtacctccacctgtcctgcgccctgcagctcggaaatggcctttttcgctttgacgacaggcagcgggcaggcatcgcctagtgcatccactttgataaattcagccatgttgattactcctctcatttgtctgttacggtgatctcaattttctgcttcggcaggatctctccaacgatgcttgccgacagccctgcggcgcgcagttcctgttccagtgttgctgcatctgccgggtctactgcaaatagcagcccgccggaggtctgcgggtcgaacaggacttcctccatggcgaagcttacgtttttaaaccggacgaacggcccggtatggttgcggttgcgctgcccggcggcggtgtacaaaaacgcatcggctgccttttctgcgcccggcagcactggcacggcatttgcatggatgacgcaggaaagtttgccgcccatcatttcatgcagatggccgagaaagctgaagccggtcacatccgtagcggcatggacgcggtatttgcggctgatctctgccgctgttttgttcagagtggtcatggagcgaatggcggcttccatcacctccggggcggcttcgcccacacggtttgccgtgcacagcagccccacacccaaagccttggtcaataccagcttgtcgcccggcataccggtgtcgttcgtatacatccggtgcggatctacaaggccagttacagaaagaccgtatttcaccccgctgtctgcaatggagtgcccgcctgcaagactgccgccggcttctgccaccttttcagcaccgccgcgcaagatctcgcccagcacgttcaaatccatatcctccgggaagcagaccagattcagtgcggtcttcacctcgccgcccatggcgtagacatcgctcagggcgtttgtggcagcgatttgcccaaaggtataggggtcgtccaccatcggcggaaaaaagtccacagtctgcaccagtgcaatgttgtccgtaatgcggtagactgcggcatcatcccggctgtcatagccgaccagaagatccgggtctttttcgccccggggcagcttttccagaatacggctcagcaccccggcacccagctttgcggtgcagccgccgccggtacagaatacgatcttatcttccttgctcatgcacgttcttcctcttcaaaatgcgtcagcacgcactttataccatgctgacgcaaaagctgttgtatctgtatgccctgctgctgcaattccggcgtgtcggcctgattgagtacagcgtaaaactgccggtcgcccaccgccttgcgaccaccctgcgtgcttgcaagcagctgtgccagcacagggggcgtaagaggtgcatccggcgcagccgctaaaaactgcggacggatggtatcgtagcggaagcagacctcccgcaagggcctatccagcgccgaaagccctgccagcgccaaaacgatatcgctttggggcagcagcaccggctcgtgcgccgccgggaccttgcaggggtagcgctttgccccatctgcttctataaacaccgcatccgcctgcgccatccggcgcaaaagctgcggctgcggcaaagtcagctttccgttttcagccggggttccgattactgcatagtgacccgcttgccataaggcggtaagcgctgcgtcatccggtgcatagcaggctgccggttgccggatgtgggtggtcgtagccacaagcacctgccatcccttgcgggcacagtggtctgccatggcatacagcagggtcgtttttcccccgccgcctaccagagaaacgatatgccctttctctgccagaaacggaagctctttttcgttcagcatctgctattactgcttggctgcaactgccattgcgatctgctccggggtaatgggcagctcgtagaagcgggtgccgatggcgttgtagatggcgtccgagatggcgggcagcggcgtattgatgaccacctcaccgatggactttgcgccaaaggggccgttgggctcatagctattctcaaactccacatggatatgcccgatatcgttgcgggcagggatcttgtactggaacagagagttctcctccgggtatccgtttctgtcgtaggtgatgttctcggtcagggtcataccgatgccctgcaaaataccgccctctgcctgcacacgggtcaggttggggttgatgggggtgccgcagtccacgcaggcgtcaaattccagcaccttcacctcgccggtctcggtatccacctctacctcggcagcgcccaccatatacggcggcggcgacaaaggcgaggtatgggtctcggtaaattccagcgggatcttatggccaaactgagaagcaaaggcgatctcggacagggtcttttggcgggtggggtcagcgctttcaaacacgactttgccgtcaaactccacagcatccgccgggcattccagcagctctgcgcccaacttgcagatctgttcccgcagcttcatggcgcacttttcggtagccttaccggtgacataggtggtgctagaggcgtaggagccggaatcgtaaggggaagaatccgtatccgcaccaaagacggtaatgttatccagcgggcagtccagcacctcggcggcgatctgcgccagcgtagtatcgcagccggtgcccatatcggcagcaccgatcataagggtataaaagccgtcatcgttcagtttgagggtagcactgcccacgtccatgccggaaatgccggagccctgcatggccatacccatacccacggcacggatcttgccgttgcccatatcccgggcgggatacttgtgctcccagtcgatcatctcgcgtaccttaagcacacaccggtccagcgcacagctggtatttactgcgccgtagtaggcgggcatcacatcgccctcctgcacggtgttcttcagacgcaatgcaatggggtccatgttcagcttgtgcgccagctcgttcacggcagattccaccgcaaacaggccctgtgtagcaccatagccgcggtatgcaccggcagacatgtggttggtatataccacatcgctgacaaaacggaatgcttcggccttgccgtacagcgggatggacttatgaccggacaggcccacggtagtggggccgtgctcgccgtaagcgccggtgtttgacagggtgtacaggtcaatgcccttcacaatgccatccttggtagcgcccagacggacgtgcatctccatctcatggcgcggcgaagaagccgtctggctttccacacggctaaagatgagcttggaaggctttttggtcatccaagtcacaaaggccgggtacacctcgctgaccgcggtctgcttggcgccaaagccgccgccgatgcggggcttggagacacgcaccatggacttgggaatgtgcagtgcattggcgatgttgcggcgggcatggaacacgatctgggtagagctgagcacattcagccgcccgtaagtatcaatggagcaataggtgcggaaggtctccatcatggcctgctggcaggccttggtgtggtacacatggtcaatgaccacatcgcacccggccagcacagcgtcgatatcaccattgccgcattcatcatgagcgcagaggttgcgcttgttgtcggcgcccacgggggcaaggctttcccagttatcctccggatgcacaaggataggattatcctttgcggtgtggaaatccagcacggcttccagcacctcataatccactttaatgagcttgagtgccttgtccacgcacttttcatccttaccggctacgatggccaccacgtctcccacaaagcggacgtggcgatcgatgagcagacggtcataggggctggcctccgggtaagtctggccggcctgcgtgtaacggcgggcatcctgcggcacatcctcccaagtgaagatggcttcgatgccgggcacttttttggcaacagcggtgttgatggtgcggacgatggcgtttgcatggggcgagcgcagcagcttgacgatcaggcagtcctgcgggatgatatcatccatatagacaggctggccggtgaccagctgcatcgcatcttttttgcggaacggtttgttgacggttttcactgtacgccctccttctgctttttccatgccagaaagctcataatgccgcgcagctggccttcgtagccggagcagcggcacaggtttccggcaaggtattccttcacctgctcttcggtggggtacggctgctcccggaataaagccagcgcattcataataaagcccgggttgcagaagccgcactgctctgcaccctgatctgcgataaaggcaccgaactcggcagcctcctcctgcaaaccctccagcgtggtgatcttgtgcccatcggcgcgggctgccagcaccgagcaggacagcacaggcttatcgtccataaacacggtgcacagaccgcagttggaagtttcgcagccgcgcttgacgctcttgcagccgtgtgcacggacaaaatcgatcaaaagcatatccggggcgatctcctcggacacccggatgccgttcaaggtaagtgtgatctgcatttacttttcctcctgcattttacgctgttccagctccagcaccgcgcgctttgtcagcacgcctgccagatgcttgcggtattcggcgctgccgcgcatattggagccggtaacgatctgcgcctttatgctttccgcaaactgtgcggcaagctgttctgccgcaagggcaggctctgccgggagctcgaaccgcacggcgcgcagcggacgcgcaccaatcacgatgcggtaatctccggtctccatccgggcggcggcacaggtcagcaccgggatatcggtctggctgttgcgcaccgactggtaataaagctgcatcggtgtcttttttacgatcagccgcaccagaacgtcccggtcgtaggggcgctgggcatattcctgcaaaggcagaatgccgcccttgtacagctctacatcacaatccatggcaaggaacatggtcagcacgtccgaaaagccgaaccggctgtaaatgctgccgcccacagttgccagattgcgcagctgcacgcccacgatatggcgcacagcctcccgcatggcaccgtgggtgtaggcggcaagccccgggtgctgttccagctgacgcagggtgaccatagcgccgatggaaaagccctcctcgttctcctcaatggtatccagccccagaccggaaaggtcgatggcggtgccgacattgatggtttccatcttcagccagatcatgccgcccaaaatgcggtttggctttttctggttcagctgccacgcttcctccagactttctgcccgcttgtattctcggatcgtcatcatgtgcagtacctctcttttctatcgctgcgatatctctgcttttattttagcacagctttcggtataatactattataaaatgctgctgaaggggtgtatttgtatgaaaaagtcgcttacagtcggctgtgtgatcatggcttccgggctgagccgccgttttggcgcaaacaagctgctggcagatttttgcggtcagcccatgctctgccgggcctttgctgctaccgccacacccggtattgccgcccgcattgtggtgactcgctcggaggaggtgcaggcgctgtgcagggcgcagggcgtcccggtgctgcttcacagcctgcccggccgcaacgataccgttcggctgggtctttcggcgctgctggagcagctgccggagcttagcggttgtatgtttctgcccggggatcagcccctgctgcgtcgggagacggtagaagctatgaccgctcttttctgccgtgagcagccctccccggcagaatggcaaaaagaaacagaacgggagatcttccgtctgggagccgtggccgaaaacgacccggcgcctcttgttggaagtcccgttctgtttggaagcagtttctttccggaactgctcgccctaccggaaaataaaggcggcaacgtgctgcttaaaaagtatcctgcgcaggtgcgcacggtctgcaatgcggacagcgcagagctgctggacgcagacaccccggaggtgatgcatcagctggaagcccttgcccggcaaaaaagttaaaatttattctgccatatcgttcttgggcagcagcacgttcagcagaattgccacaaaggcggccggaacaatgccggactcgccgcagatcagctggaagacctgcggagcctgtgccagaatgccactgttggcacccatgccatagcccacgcccagtgccacagacacgatggtcaggtggcgcggagtcatcttttccttggtgatcagctggataccgctgaccacgatggaagagaacatcataacggcagcaccgcccagaacggcctgcggcatgatggaaatcagcgcgcccagcttggggatcaggccgcagaggatcaggaacacagcaccggaggccagtgccatacggttgaccactttggtcatggccaccagacccacgttctggctgaaggaggtgttgggcagcacgccgaacagtgcggcaaaggtagagccgaggccatcgcagatgacgccgccggacagctccttatcagagggctcacggttcataccgccctccatcacgccggagatatcgcccacagtctccactgcggtaacgatgaacatgatcagcaccggcaggatcgcacgggcatcgaataccaccttgaccggcatcagcttgggtactgcgaaccaggaggcctgtgccaccttgttccagttgagcacccatgccttggtgaactctacaccatcagcagtcacgccggtggtgggcagcaccagacccataatgaaagcaaccacataaccggccagaatgccgatgaggatggcagaggagctgaggaagccggtggtccagtgtttgaagaacaggatgaccaccagcacgaacaatgccagaagcaggttctccacagagccgaagtccttggccttgttgccgccaccgaaggagttgatgcctaccgagatcagcgaaaggccgatggaaagcaccaccgtgccggtgaccaccggcggaaagaacttgcgcagcggcttcaggaaaaagcccagcacgctttcaaaaacaccgccgatgatggatgcgcccatgatcgcgccataggccagcacaccgccgcccatcgtgcccacaacgctgttgaacacgccgataaagccggaactggtacccatgatgataggcactgcgccgcccacgggtccgatggtgaacaactgcaccagcgtaacgatgcctgccacgaacatggcgctctgcagcagggtgacctgcaggtctgcaaactcgccgcctgcaatgccgcaggcgctggtaatgatcagcagcggggtcaggttgcccacgaacatggcgcagacatgctgcaagcccagcgggatggcctgccgcagggacattttggcttcaaactgataagccgcttcttcaagcttgacttccttcaaaaattccactctcctcaaggttttaaaggtttatgcggttcggatgctttgcaaaaaagcgaaaatattatagcaaaatgcagataagatgtaaaataagtatgactttttatatgaagaaatgctgcatcctttaagcgaacttttcttcggcagacaagcaaaaaagcagggcttccgcatgatttgtccagcctgattcgcctggcatcatacagaatcccctgcttttttcgtgcttttctctgttttttgtgcgatacggaaaaatttttgtttctgcagtcagagcagtccataatcccgcaaacagcgcgtcagccctgcctgtgtggtgtcaaatacgatgccatgcgcctgcagcttgctgcaatccatcgcaagattccgtgcccagtcagcttcctgaatatcgaccgtgatccccagtgtctcagcaaactgccgggcggtcagtaccatgttttcagcgttttcactgccaaagttatagaccccgccgggcagggtcagggcagcttccagcagtgctaccgcctgccggacataggtgatgccccggaagtcccggacagaaaagcggacagattctccccgctgcgccgcacgcagaaggttcagcggcaggttgccccggatgggcagccggtagcccggcaggtcgtacatccatgtggcgcgcagcaatacggcacccgggcagagcgcctgcacccgctgctccatttccagcttgtcctgcccgtacacattggcaggctttaacggaattgtttccggcagcgggccggactgctccacaccggcatagacctgatccgagctgaaagccaccagctttgcgccgatctcagctgccgcccgggcaagccagaccgacagttccacattggcgcggtaagcctgctccgggtggccggcgcagtagccggtatccgaaatggctgcagtgtgcagaatgacatccgggcgctgctgcaaaacagcctgccgcacggcgtcctcccctgctgttgccagaaagcctttgggaaaggtgcacagctcgtaacgccccgcccattgctacaccacgcgggagcccacaaagccgcctgcaccggttacaaggatcttcttcattttgttctcccgcaataaggcatcagataaaaaattccagcacgaacaccacggcacagcagcctgcagccacctgaaacaggcttgcgccaaaccatgcggcagcaatgccgactaccagtgcaacagcacctgctgccgggctctgcgttgcctgaataatggccggaaaggtcatcacagccagcgttacatagggcacatagtacaaaaacgactggataaagcggtttttgatcggcttgcggatcagtgtcagcggcaggatacggatagcataggacaccagcgccatgaccgcaatatagatataattgttatgcgtcatcttcgttttcctcctgcctgaccgggaacagcaccgccgctgcaccggagatcgccactgttaaaagaatggtgcgggtaccctcggagagtgccgagatgcccggcagatagctgcacagaaaactcagcgcaaagctgatgacgaccagcaccgcaacgatccgatccttgcgggccggcgggatgatgatggccagaaacattccgtacagcgccacactcagggcgctaaccacccgcagcggcagcagattgcccgctataatgcccagcgccgtaccacaagcccatgccggcgccgccagcaggatagcgccataggtataatacggattcagactgcccgggcgggcgatggtaatgccgaacagttcgtccgtgacatcatagccgatgagcagccgatgccagaaaggtgtttccggcgcaaagcgttgtgccagtgcacagctcatcagcagataccgcgcattggcgatcagcgtaatgaccgccacctcaaaataggtggcgtttgccatgatcaacgcaaatgcggcatattctccagcggaggcattgttcagcaggctgacaagaaacccctgaaacggcgtaaagcccgccttgcgcgccgcgatgcccagcgaaaacgataccgcaaagtagcccagtgcaatgggcacaccgtcccgcattccgtcgcagaacaccttgcggctgaactgatccgcccttcctgtttggacgagctgcggctccaaaagcctctgcttcgattccatagttgatacttcccctttcctattttgcaaacaacagattctattatactcccctgtgggcggagaaggaaggggtttcgggctttttttgtgtaaaatgctacggtcaaaatgcttagagtttgcgctgatataggaaccactttgaatgttacggcttgtttgatcgtgctggaagataaaaacaccccggaaggtttcgtttttgaaggaccttctggggtgttggtgctataagggattactcgagctcaatggttgcaggcggcttaccggtgcaatcgtagaacacgcgattgacgtgcttgacttcgttgacgatgcggctggtaacagtgcccagaacatcccacggcatgtcatagctttctgcggtcatgaagtcggtggtggtcacggcgcgcagcgcaacggcgtagtcgtaggtgcgctcgtcgcccataacgccaacgctgtgcatattggtcagtgcagcgtaatactgactaatttccttatccagaccggccttggcaatttcttcacgccagatggcgtcagcgtcctgcacgatagtgaccttctcgggggtcacttcgccgatgatgcgaatgcccagaccggggccggggaacggctgacggctgaccagatactcgggcagacccagctcacggccggcctgacggacttcgtctttaaacaggttgcgcagaggctccaccagctccttgaagtccacagtatcgggcaggccgcccacgttgtggtggctcttgatgacggtggactcgccgcccagaccgctctccaccacgtcggggtaaatagtgccctgtgcaaggaagtctaccttgccgatcttcttggcctcttcctcaaacacacggatgaactcttcgccgatgatcttgcgcttgcgctccggctcggtgacgcccttcaacttgctgaagtagcggtcgcgggcatccacacagatgaagttgatgtcgaagccgttggcgttgcccgggccaaagacagagcagacctcttccttttcgttcttgcgcagcaggccgtggtccacgaacacgcaggtcagctgcttgccgatggccttagccagcatagcggccagcacggaggaatccacgccgccggacagggcgcacagcaccttgccctcgccgatgcgctcccgcagagccttgatgttgttctctacgaaggaatccatcttccaatcgccggagcagccgcagacattgtacacgaagttgcgcagcatcttcttgccctcggcggtgtgcagcacctccgggtggaactgcaccgcatacagacccttttcggcattttcaacggctgcaacagggcagtttgcggtgtgggcggtgatctcaaagccgggagcagcctgctcaatgtagtcgttgtggctcatccagcagatggtagagggctgcacatcggtgaacagcttgctctcggtattcacgaacacctcggtcttgccgtactcacgctcgggagcgcggcagacatgaccgcccagcaggtgcatcatcagctggctgccgtagcagatgcccagcacaggcacaccccagctgaagatctcggggtcgacggtgggagagtcctccagataaacgctgttggggccaccggtgaagatgatgcccttgggattcttggccttaatgaccgaaagatcggttttataggaatagatctcgcagtagacattattttctcggacgcggcgggcaatcagctgattgtactgtccgccaaagtccagcacgatgacagtttcatgctgcatgatgttttcctccatttttaagtgtgttttacagataattttagtatagcacatcttacaagaaaaagcgacagtttttgtgaagttttctgtcatttcattctgcggatcggatgtcgcagcacggttttcagcttctccggtgcggtgcggcgtggatctcccagatagatctcgtgatggaagcgtgtgtctgaaaaatccgggcaatatccctgctccgcagcaaacgcatccatctgccgcaaagtctccggctcggtgtcataggagccgatgtgcatacactgcacgcacagaccttcatcataggtgaaaaattccaccttagaaaagtcttttttctttttggtagtggcctcctgcactgcccagtcaaattcggcacgggtgacaaattccggcagacggatcatagaggtccagataaaggtctccttgttggaaaaatccacgccctctgcactgggctgatgccacagtccctccagcggcggaacaacatattcgaaatagccgtccatcttatggctgcccttatagctcattttaatggtaaacgcaatgccgtacagcagttccagcgctgccttgtattcccctgccgggtcattggggtcgcccttgccctgcaccgccacaaaattcatcgcagggacggtgatgatttgcggtttcttcggcgggaggtaaaattctttatattccttcttatagtcaaatggcatccttcttttctccttccaacagctcacgctgtttctttttgctaaagccgcccagcacaagccgataagatttttccagcatctcccgcagcaatgcatccggcacatttccctctgcttttacggagttccaatgcaccttattcatatagtagcccggaatgatatcttcatactgtcggcgcagaaaatcgccctcggcggggtccagcttgcaagtaatatacaccggctttcccgtggcatcatccagacagacggctgcaaacattttgccgccgatgtggtatcttatccagttccactctgcctgtaagtctttggtaacgccaggcttttgaagaagctctgtgtcgatccagctgtatttcatggcagcacctccgtttttctcagtataactgatttggaggcacttgtaaacgaaaagttgttggtttttacttataatacgtcaattctgaaaaatcggcagcaaaaagagccatccgctcagaaaacctgagagaatggctcttgcattaaatgttatgatcagatggaaatggtgttgcacacgtccaccagcacggggtcaagactcttggtcatttccaaagcctcgtccacggggtagtccaccagcttctcacccttcatgccgacgatgcggttatacttgccctgctccagcaggcagacagcctgataacccatggcagaagcattcacgcggtcgcgcagggtgggagaaccgccacgctgcacatgacccagaatggttgcgcgggaatcgataccggtacgtgcctggatctcgttggcgatctcctgtgcatgacccacgccctcggccacaatgatgataaagtgacgcttgccggtcttctgggtctcggcgatcttatccagaatgtcgcgctgcatatcgaattccttctcgggcagcagcacagccatagcgccggaggcgatggccacgttcagagcgatgtaaccggcgttgcggcccatgacctcgaccacactgcagcggtcgtggctctgggtggtgtcgcgcagcttgtcgatcatttccagcgcggtgttcatggcggtatcgtagccgatggtgtaatcggtgcagccgatatcgttatcaatggtgccgggcaggccgatcatgggaatgccgcggtgtgccagtgcgcgggcaccgcggtaggagccgtcgccgccgataacgaccagcgcatcaatgcccagctcgcggcacttttcagcgcccttatcctgaccttccttggtcttgaactccaagcagcgtgccgtatacagaatggtgccgccagcagagatgatgttagaaacgctgcgcaggttcatttcaaagcactcgccgttcagcaggccgttgtagccgcgctgaattccgatcatacggaagcccttgtgcaggccggtgcgtaccacagcgcgcacagcagcgttcatgccgggagcatcaccaccgcttgtaagcacgccaatcgttttgatttgcttttccatacgagagattccctccaatttacagttcagttcttcatttacccttttgcctgtaccctcttcttccagaaacaggccagttgctttgcaacagctttgattcgcctttaatgattatagcacaccatccagacaaatttcaatagggttttgagactttatgcaattccatgcggtacaaaataatgactgtacatcgcattatttttgcaatttgtaccacttggaaaaattgaaatcgtcccatgcggtgccattcgtgcgcaaatatgtcattttgttgcaacattttctgcgcccagcagccgctccagctctttgaagaagagcggatgcccggaagtgtacagccggcgcggtgcggccagcttctgcttggtatcttccagatacaggatcaccgggatatcgccatcaaagatctccagcaggttcaccactttagcgtactgagggcagctgcgggacggcagacggataaacacccgccgggcagctgttttgacagggtccgggcgacctttatccaagcgggtcgggtcgtagctgtcaatgggcagaatgctgtctgccagcagcttggaggcttcatcctcccgcacggaaagccgaccatcgatgaccacaacagcgttttcctgaatggcatcccggaacctgtccagcaccttggggaacacgattacctccatggtgccggtcagatcctccacactggtaaaggccatcatgctgtttgattttgtcgtcatcatgcggttttttactactgcacacacaatgcgcaccttttcgccgtcctgcacatgggcatcctcgccggtgaggtctttgatggtgtgggagccgatgcgggcggatttttcccggtaagcgtccagcggatgaccggacaggtacagaccgctgacctctttttcctgctgcagcagctcggcaggggtgtactctgccaaggggcggatctcgtagacgtcctcctgcgggctttgctgcacttccccgctcattacggagaacagatccaactgtccttccagattgcggcgggagtcggtctcgatgctcttgagaatgccctctaccgcctccaccatgctgtggcggttggagccaaaacagtcaaaggcaccggctttgatcaggctttccaccgcgcggcggttcagctcactgccatgcatccgcttgcagaaatcataaaggcttgtgtagggcttttccctgcgctcagtgactgcgttctcgataaggttgcggcctacgtttttcaccgcgttcaggccaaaacggatctgaccattatcatcggcggtaaagccgccgttggagatattcacatccggcggcaggactttaatgcccagacgggcgcactcgccggaatactcgatgaccttatccgtattatccagcacactggtcagcaatgctgccatgaactggctggggtaatggcacttgaggtaagcggtctggaatgccacataggcgtagcaggccgcatggctcttgttgaaggcgtaggacgcaaagctggacatctcgtcgtagatctggtttgccacctgctccgggataccgttggcaacgcagccggggcattcgtggccgggctcggtgcagccatgcacaaaatgctcccgctctgcctccatgacggcatgcttctttttgctcatggcgcggcggacgttatctgcctgcccgaaggagaagcctgccagctcccggaagatctgcatgacctgctcctgatagacgatgcagccgttggtcacatccagaatgtgcgccagctgcggggtcttgtagctgatcttatccggttcgtgccggttgcgcagatagatgggaatggagtccatggggcccggacggtacaggctgatcagagcgatgacatcttcaaggttctggggctgcaagcccacaagcacctgtttcatgccggaggattccagctggaacacaccctcggtatcgccctgccccagcattttataggtatccgggtcgtcatagttcagatcacggatggagaactccgggtgctgcttttgcaccgcaacctccgcatctcggatgacagtcagggtgcgcagacccagaaagtccatcttcaaaagacccagctcttcgatctcggtcatgttgaactgggtcaccggcaggccgtcgttggtggcaagcggcagataataatccgtcggctccggcgtaatgaccacgcccgccgcgtgggtggaggcgtgccggggcatgccctccaccttcagtgcggtgtcgatgagttcggtcacctgcgggtcggtatcgtagagcttcttcagctcgctggaaacctccaatgcccgcttgagggtcattttcagctccatgggcacaagctttgctaccacgtccacctgctggtatggaatacccatcacgcggcccacgtcccggatggcgttgcgggctgccatcgtaccaaaggtaacgatctgcgccacatggtccgcaccgtatttgcggttgacgtagtcgatgacttcctgtctgcgctcgtagcagaagtccacgtcgaaatccggcatactgacgcgctcagggttcaaaaagcgctcgaagatcaggttgtagcggatgggatcgatatccgtgatgcccacgcagtaggcagcaatactgcccgcgccggagccgcgtcccggccccaccgggatgccctgactttttgcaaaattgatatagtcccacacgatgaggtagtagttggtataccccatggtcttgaccacgccgatctcgtatttcaggcggtcgatgttggcctgcggcacgtccgggccgtagcggcgctccaagccgtcccagcagagcttttcaaagtaggcctgattatccatgccgtccggggctttgtagtaagggatcttggtgtgaccgaactcaaagtcaaaattgcactgctcggcaatctttgccgtattggcgcaggcttccggtaccatggagaacagctcgtacatctcgtctgtggtcttgacgtagaattcatcagtctggaactccatgcggtcggcatcctgaatggtcttgccggtctggatgcacagcaggatgctctgcatcttggcgtcctctttgcgtagataatgggcgtcgttggtggctgccatggggatgccggtctcgcgcgaaagtttgatgagttgcggcagaacagtggaatcctctttcaggccgtgatcctgcaattcgatgtagtaattctctgcaccgaacagatcccggtaccacagcgcagtcgcctttgcgcgctcgtagtcccctgccagaatggcctgcgggatctcgcctgcaagacaggccgaaaggcagatcagtccctcatggtattgctccaaaagctgcttatccacacggggcttggagtaaaagccctccacaaaaccggcagagaccattttgatcaggttcttatagccggtctcgtttttgcacagtaaaatcaggtggttattgccgtctattttatttaccttatcaaagcgggtgcgagtggcaacatacacttcgcacccgatgatgggcttgatacccgcctttttggcggccttataaaactgcacacagccgtacatcacgccgtggtcggtgcaggcaatggcggtctgtccgcactccttcacccgctccatcagctggtcgatacggcaggcgccgtccagcaggctgtattccgtatggatatgcaaatgggcaaaggaacgggtatttgcggtgggttcactcattgtactgcctcctgtccctcctgctgacgctggcgcagattttccgccagtgcttccagctttttcatccggtgtgataggccagatttgctcacagccggatcaaagcagccgcacagcgcggtaagcgaaagatccgggtattgcagccgcttggctgctgcctgctgcagcacctccggcaaagtttccagcgcgtgctgctcctgcaaatagcggatggctttcagggtctgggcattcgcccgcgcggttttgccaaggtttgcggtatcgcagttggtctgccggttggtctgattgcgtacctgcttgaacgccttgagtacgctgatctgggtcgcggcatccgcagcgcccataaagcggagcagccgctccacattggcaccggtcttgacgtagatcaggttcacgccgttgcggcgggtgcggtggggcgcaaactcgtgctcggccagcagtgcttcaaaatcccgggcgaggttcgtccgggaggtgagaaattccaggttatattccttttgcgggtcggtgaccgtgccactgcacaaaaaggccatggcgatataggcgctgacgcaggtctgacaacggatgagcccggggtcgatctgcaagctggtctccctgccggtggtaccgaacagttcatgcaggcgggtgacctgctccgcatcgcggatgttgaactcgtacagcacaccgctgacgcggggcttttccaggatctcgccccggatgccgcagcgggcaaacagctgctgcgccagctgcaccgtatggggttgctcggtttgcagcacaaggccgcgggcatcaaagtatttggcaaagcaggcaatgccataggcagctgcacgcacacagcattccttggtggggctgcgctgcgcgatctcctcccgcgcactggatgcaaaactcatagtatttcctctgttttcagcgcacggcatcccggtgctgcaccccgggctcgtagcccagagaggtgcagtattccgcaagtttgcgtgcgaatgtgatggagcggtgcttgccgcctgtgcagcccaccgcaatggtcagctggcttttgccttccttgacatagagcggcagggcgtactgcaaaaagttctcgtaccggcgcagcagctcctgtgcttcggggtggcccatgacaaaatccaccacttcctgatccagtccggtcttgtgcttcagttccggcacatagaaagggttgggcaggcagcgcacatccagcacaaggtcggcctccggcggcaggccaaacttgaacccgaaggacataatggtgagacgcatagcattttttgccccgccgtttttcatgaacaaatcgcagatacgctctttattctgggaggtggagagcaggccggtattaatggtatagtttgcacgttccttcaagggctgtaagatttgccgctccttcaaaaaggcatccctggtagagatgccctctgcaatgctgatggggtggcggcggcgggtctcgctgtagcggcgcatcagcacatcgtccggcgcatccagaaacaggatcttatagggtgttttctgctcgtccagctgctgcagggcagtctcgatctgttccctgctgcggcagccgcgcacgtccatagaaagcgccacccgctccagctggttgtcgcccgccttggaaaacgccgtaatgctgggcagcagccccgccgggacgttatcgatgcagaaaaatccgatatcttccagcgcattcatagccacagactttcctgcgccggaaagcccgctgacgatcaacagctccatctgtgttccacactccctctatttgcgcagttcagcggactacgcggatctctttttccagatcgtaaccggtcttttcctttacgatagtgcgtacttcttcgcacagtgccagcacgtctgcgcaggtggcgccgccaaggttcaccacaaagccgcagtgcttctcgctgacggcggcaccgccgtgtcggtagccccgcagaccgcactggtcaatgagggctgcggcaaaagcgcccaccgggcgcttgaaggtactgcctgcgctgggcttatccagcggctgcttatccagccgctttgccatcagctcgtccatctttgcgcggataacctccggctcgcccggagtcagggcaaactgcgccgagaggatacagccgccgttttcttcaaaaatgctgtggcggtagcgcaggtcaagttctgctgccgccgcttcttttacttcgccctcggcggtaaggtactgcaccgtggtcagcacatccttcatctcgccgccgtaagcaccggcgttcatgtagaccgcgccgcccaccgtaccggggatgccataagcaaattccagtccggtcaggctatgctccagcgccgttttgcacagcgccgagagccgcacgcccgccccggcggtgagttgtgtgccgtgcacctccgcggtgtcctgcatggaggagatatccaataccgcaccatcgtagccctcgtcggcaaacaggatattactgccgttgcccagcaaataataccgaacgccctgcgccttgcacagggcaacggtgcggcaaagctgtgcatggtctatcggctgcacgaacagccgcgccgggccgccgatcttaaaagtacagtgcgctgccagcggctcgttttctttataagcaatgcctgctgcggtcagcagctgcttgagttgttccatagggtcaggctccttttttatcgggaaaatcagtccattttgtcatccagtcccagccggatcagcagctccttggctgcgttgtagcccatcttcttctggcggttattgatggctgcagtctccagcaccacagccagattacggccgggagagaccgggatgctggtgctgggaatgctgacgcccagaatgtcgtagtattcactttccagaccggtgcgctggtagttcttggtggggtcccacgcttccagctgcaccaccagatccagactttcgctcagcttgacagcgcctacgccgtacacgcgggccacattgacgatgccgatgccgcgcagctcgatgaagtggcggatattttccggggcagtgcccatgatctgacggttggacaccttgcgcagctccacggcatcatctgccaccagacggtggccgcgcttgaccaactcaatggccagctcgcttttgccgatgccgctgtcgccaaggatcaggatgccttcgccgtacacctccaccagcacgccgtgccgggtgatgcggggcgcaagctccagattcagtacgctgatcaggctgcccatcaaagtgcaggtagtctcgttggaacgcagcagggcaaccgcgtgcttctgcgccagttcctgcatctccgggaagggcgccagctcctcgctgcggcagacgatgaccgccgggggctgctgccggaacagctgctccagcgcttcgtagcgcttttctgccgtcagaccggacagaaagttcatctctgccagacccatgatctgcaggcgaagcttatcaaagtaatcataatagcccgccagaaacagacccgggcggttgacctcggcgatctctacgctgatctcatccagcgcccggggggtgtataccacttccatgctgacgcggtcggtcagcgttttaagcgaaacattgaacgtacccatcctggttcctcctgtatccttttgccgcgctgtgctgcgggcattcttattcatattataataaaattcggcggcaaatacaacgcccggggcgctgtttttgtacccacggcgggaaaccgacgctgcatcgcagcgtgtgcacaggatttttacatttttcttactttacatgggttttacatttcggcgatttcagattttacattgtttttctatacttaaagcacaggagaaaaacacgtcaagaaaagtgaggaaaacacttatgaccatttttaatgtcttttcgctgctgggaggtctggccctgtttttgttcggtatggacatcatgggcaaggcactggaaaagcaggccggcggtcagctgcagaaaattctcagcaagctgaccgataatcccctcaagggcttttttctgggtctgtgcgtaaccgccgtgatccagagctccagcgctaccaccgttatggtggtgggctttgtcaacagcggcatcatggagctgcatcaggccattggcgtgatcatgggcagcaacgtgggcactaccgtgaccagctggattttgagcctttccggtttgcagggcgacagcctgctcgtccagctgctcaagcccacttcttttagcccggtgcttgcatttatcggcattttgctgtatatgtgtaagagtgagaagaaaaagggcgtgggcaccatcctcatcggctttgctgtgctgatgaccggtatgaccaccatgtccaacgcggtgctgccgctgcaaaacgaggcatggttcaccagcctgttcacccgcttctccaaccccctgctgggcgttctggtgggcgcactggtcaccggcatcatccagagctccagcgccagcgtgggcatcctgcaggcactgagcgccaccggcgtcatcacctacggcagtgccatccccatcatcatgggtcagaacatcggtacctgtgtgaccgcactgctgtcctctgtgggtgcgaataagaacgcccgccgggctgccatggtgcacctgtacttcaacattatcggtgtgaccatctttctgttcgggttctacgggctcaacgccgtctgccactttgcctttgtgaataccaccatcgaggcttggggcattgcaatcgtgcactcggtgttcaatattctggccaccgtcattctgctgccctttgccaccgggctggaaaagctggccatcctgaccattcccgattccccggaaaaagaggagtttgcgctgctggatgaccgtctgctgaacacccccgccgtggctgtggagcgtgctcgcgccgctaccgctgaaatggccgagcttgcccgggtgggcgttgtgcaggccatgagcctgacccacgaatggaacggcgaacttgcccagaaggtgcgggacgaggagtgccgggtggaccggtacgaggacgcactgggcacttatctggtcaagctgtccggccgggaactgaaccacaccgacagccagagcgtgaacaccctgctgcacaccatcagtgattttgagcgcatcagcgaccattccgtcaaccttctggaatccgccgaggagatgcaccagaaggagattcacttctccaaggatgcacaggaggagctgcaggtgctggaggatgcggtgcaggacaccctgagccgcaccaccgatgccttccgcaagggggatctgcaccttgcttccaaggttgagccgctggaggccgtggtcaacgagctggtgcgcgccatcaaggcgcggcacgttgcccgcctgcaggccggcagctgctctattgagtacggttttgtgctggacgatctgctgaccaactacgagcgtgtatgcgaccattgcagcaacgtggcagttgcgcagatcgaggtggcacaggacagctttgacacccacgcctacctgaacgatctgcgccacggcaacgacaccaaggaaagtgaagaattccaccgccgtctgggccgctaccgtgagcggtatctgttcccggacggacagactgctgaggagaactgagttatgatctatattgtagaggacgacgcttccatccgcgaactggagcagtacgccctgcaatccaacggctacgaggtgcagggctttgagagcgccgagcccttctggcaggccatgcgtgccgctgagccggagctggtgatcttagacgtgatgctgcccggcgaggatggcttttccatcctgaaaaagctgcgcaacaccccttccctgcgcaagctgcccatcattatggtcactgcaaaatccagcgagctggacaccgtgcgcgggctggactgcggcgcggacgactacattgcaaagccctttggcattatggagtttctcagccgggtgcgtgtggcgctgcggcgctctgccccggaggtaaggccggatgtgctggttttccacgagatccagctggataacgcccgccacagcgttacggtaaacagcacccctgtggagctgacctacaaggaatactgcctgctgcgtctgctgctggaaaacaccagtctggtggtgacccgcgagaccattttgcaggtagtgtggggcaccgacatctcggtggaaagccgtaccgtggatatgcacatccgcaccctgcgcaaaaagctgggcgatgcggggcgttacatctgtaccgtgcgcaaggtgggctacaagctgaccgatgaggaggccgaagaagaatgaagctgcgcagcatggaagaaaagatcagctaccggttgttcctgatgggctttctggggcttatattcaccgctgcgctgtgcatttttgtattccataaagcctttacggcgcaggcatggtctgggctggagcgcgaaaccgatcttgtgcgcgccgggtacgagcagaccggagaccccacacagctgagtgcctttgtgaccgatgatctgcgcgtgacgctgatcagtcaggacggcagcgtgctgtttgaatctgccaccgaccagcccatggagaaccatctgacccgcccggagatccgcgatgccattgcaaacggcgagggtcgggacatccgcgattcccagactatgggctatgagacctattactatgcggtgcggctttccggcggggatgtgctgcgcgtggcacaggacgccgagaccgtgtggtccatctatgatgccaccatcccggccatcgtgctgagctgcgtggcgctgatgctggctgctgcggtgctggccgccctgctgaccaaagcactggtacagccggtgctgaacatgactgaggatctggatcacattcaggaaaatgtgccctaccgggagctgatcccctttgcggaaagcatccattctgaccgcatcctacgggaaaacaacgagaaaatgcggcaggagtttactgccaatgtcagccatgagctcaagaccccgctgaccagcatttccggctatgcagagttgattgagaccggcattgcaaagccggaggatgtgccggatttcggtcgcaagatccacagcgaggccacccgcatgatccagctggtcaacgatattttgcagctttctaagctggataccgtaagcgagaccggggacacccccgtaatggaaacggtagaccttttggaggttgccaaggagtgtgtggagcgccagaaactgaacgcccgccgcgcctatatctccctgacttatctgggcgagagcgccccggtgcttggcagccgcgcgctgctggatgaactgtgccagaatctgtgcgacaatgccatccgctacaaccgcccgggcggcaaggtacaaatcattaccgcctgcaaccgggacggacactgctccctgaccgtaacggataacggcatcggcatcccgcgggaagcgcaggccagcgtgttcgagcgcttttaccgggtggacaagagccgcagcaaggccaccggcggcaccgggcttgggcttgccatcgtcaagcatattgcccgtatccacaacgcccgcatcaagctggaaagtcaggtagacgttggcaccaccatcactgtcacctttcctaccgcctcttaatacggcatgaaatgcacgtctgtccgccattgcgggcaggcgttttttgttgggtcaaagcccgcaatgctgccgcttcgcagcgctgcccgggcttgcaggtgcagcacatccacgccctgctgccagcagctttgcaaaagtgtggtgcactgcgccgcaagctgttgctgctgcgcctgcgtgggcaatgggctgtgggcggcacgttggcagtccagccgcacaagcacctgcgccttttgcagggtgaccgaaacgatgcagcgccggatgccgatgcgctccccttccagccagagctgccgggtgccgccctgcccggtaagcagccggtagacctcggcatgctccggggacaaggacgtatcgcccgctacggtgtgcagaacactgccctcctgtatcgttacctcttccgcgttccacccgagaacaggcagaagccccggctctgtgtgctcatacagccgaggcgcggtgggtgctgcggcctttatttgtgccatcagggcatccggtaaagcggcccgtgtggcaaggtggcctgtctctccttctgcgcaaagcagtcttgcggctgtgcggccgcagccgcgccgcagcaccagctgctcgtactctgttaataatggttcttccgcttttgacagcagcagataatcacacaggcggtagcttgcggtttggggcagtgcctgctctgccccagccagcgcctgttccatcgtttgcccctctgcctgcacaaactgtaacgcggcagaggcctcggcggcatcggcggcagcctgcggtgcctgatagagcagccctgcctgatacccctgccctgtctgtgaaagatacaccgcccgcaccatgcttttctcggtgctttcgcagcgcaggaacaaaaagcaccaccctgccagcagtaaaaacagcagcggtttgcaagatttctgttttctcatggctgcacctctgcttccggctgctgccagagcaaccggatggcggcgcacaacatggacgcccggtagacagcgcacagcaaccacagcagcaaaagcagcgcatccatgcgggaaaagcttccgctgctccacgcccgcagcaactccagccgggggtaggttccgctgccaaacagcaaagcactgcccagcaaagccgcagcctgcaccgcaaagccccatgccggcagccagaccgtgcggcgggcagaccgtgcactgcacagaagggctccggcaaagtattctgcgtagaccggtacgccccagtttgctacggtcggctgtgccggggtaaacagccggtaccagtgcagctgccctgcaagccccaacaggcagaccacgccgcccacagcggcaaaccaccacagcacccgtgccgaagcgttccagcttgcgggagggacagcccaccccgcccagagcagcagcggcagaaagcccagcagcgccatggaggaaaactctgccgtgcacagttcttgtgcctgcacgagggtgtgcaccagttccataaaaagcccggctgtcagtgccagccgcaccgcaagggagggcgctttgttctgcaacattgccactgccagcgccgaaaggatgcacagacacaccgcgctgacagcgcccagccacagcgcccggcacaccgaaacgctttgcgggatgccgtctgccagcgctgcagttaccacactgagggtcaacgccgccggggtgaaacgttctgtctgctgcttcatgaccgccgtttccccctctcccgcttttgccagatattgaacccctgccgggacagctgccggtagttgcggcgcagaacgccgtcctcggaaagcggctgctgcgggaaggggtgcggcgcaagatacggcacacccaatgcttcggtgctgacgaggctgagcaaaaagccgaaaaacgctgctgccagtcccactggtccggcaagccctgccaacagcaccgtgccgatgcgcagcagggtggcaggctcgtacagacccggggtgacaaagactgcaatggccgtgatgctggccacaaagatgaccggggtgctcataagcccggtggcaatggcggcatcgccaatgatgagcgccgacaccagactgaccgagtgccccagcgactgcggcatccgcagcccggcctcccggataatctctaagagtaggatcaccagcagcatctcggcaaacaggggcagcggggtggccttttcggctgcttcgatcttatacagcagctgcgggggcagcagctccggcagatacactgccacgcacacaaaggcccccggtaagaacaccgtaaggtagaaggaaaagtacttcagcacccgcagaaaagaggagaacgccgccgtggaagcgtaatcgtccagacactcgaactgctcgctgaacaaagcgggcagcaccagcgccgaggggctgccgttgaccaaaattaccagcttgccctcgcagagcttggcggcagcgaccgccgggcgctcggtgtagtgcaccggggtgaacagccgcgccttgccgggcagcagccacggcacgaaataactggaatccagcagcagttccggccttgcactttgcaaaatggcgcgcacccggcgcaccatggcggggtcggcacggtccttgcagtagcaaagagcgtactcggtattgcagcaagtgtgcgcctgtgcggcttcctgcataagggtatcggtacggacaaggcggcgcagaaggctcagattcacccgcagaaggtcggtaaagccttccctgctgccgcgcaaattgccctcgccggatggttcttccacggagcggaatttgagcccctgtaccgaaaagacgatgccgctgctgcagccctctaacagcagcaccgccatgcccgccgtcagccgcgctacgagctgcgacatatcctgcaccggagtgctctcggccggaaacgccgagccgtgcaggatatgcgcataggcttgcgtaccagtaagccggacagaagcagactgccgcccggcagcgtccagcaagagttcccagagtgaatcgagacttgccatgccgtcaaacattacgatgcaccctgggcagccatacaaaacgatcttcttcgcataatagtccgccgactgaccaaacctagcatcaagcgcggacaggttttccgtaaggctttgcgaaagctgctgcacatccatcactcctttgtgtgtgcagtatgcccgctttgccgcagcggaatacgccgcgcacaccgcaccgggagggtttgtgcatgaaactgctgctttgccgcactattattttgtatctctgcgttttgtttgccatgcggctgatgggcaagcgtcagctgggagagctgcagccggaggagctggtatccaccatcctgatctctaatctggcgtccatctccattgaatcggaggatgtgcccattaccgccagcctcatcccgctgttcctcattgcggcgctggagctgctggggtcggtggtgagtttccgcagccagaagttcttcaattttctctccgggcgtcctaaaacggtcattctggacggaaagatcgaccagaacgctttgcggatgctgcggctgaccaccgccgacctgatggaggcgctgcgcggcaaggatatctttgacccgcgcaaggtgtcctacgccgtaattgaaacaaacggcacactgtcggcggcgctgcgcccggagcaggaagcagccaccctctccgatttacagttgaaggtacagcagacgcaggccaccatcccctttgtgctggacggacaggtgctggaggataatctgcgctggtgcggcaaggaccgtgtgtggctggaacgcaccgctacggcgaacacggtgctgccacaggagatcttactgcttatcggcaacgagaccgaggactattttctgctgaaaaaggaaggccgtcagccgggaggaaaaggatgaagcggatctatgcgtgtatcctgatcgtggcggcgctgctgggggtatccctttatagcagcggacgggtgcagggctttgcacaggatatctcagccgacttggactgcgcccttgaggctgtacggcagaaggactttgacaccgcgcggcaggcgcttgccgagggtgcagaactgtgcgataccatgcgggaaactatgagccatctgctgcgcacggccgactacacggaactggaagccgcgctgcgggcggcagacggataccttgagcagcaggccgcagaggaggcactgggcgaactgcgccgcgcacaggtagaggtggagcggctggagtggcttgcccggcggctggtataagatgagcaaaaaaggacactgcacagtgtttcgtgcagtgtcctttttttcatgatagtttactgattttccttgcggtcgcccacaagctttttcagttcgtcaaggaagctttccacgtccgcaaactggcggtagaccgaggcaaagcggatataggccacctcatcgatctttttcagttcctccatggtcagctcgccgatgcgcacactggggatctcgcggtcgtaggagctgaacaaagcctgctcaatgctgctgacagcacgttccagcgtttcgtagctgacaggacgcttggcacaggcgcgcagcatggcgttgaacagcttctgccggtcaaagggttcgcgggagttatcctttttgatgaccaccagcggcaccgtttccactacctcgtaggtggtaaagcgcatgtggcagttcaggcactcgcggcggcggcggatgcgctcgttatcttccgtggggcgggagtcgatcaccttggattcctccgcgccgcaataagggcacttcatctcttgttcctccgcctcagtttttctttttgctgcgttcgctccacagcacccatgccgaggtggaaacgcacagagaggtgtacacaccgctgatcatacccatcatcagcgggaatgcaaaggtaaagatgctgtccagaccatagagctttgccacgatgcacatcacacccagtgccatcacggtggtgatggtggtgatcagggtacggcgggcagactgattgaccgactggttgaccagctcctcaaagctgccctttttgcccataagggtgcggttctcacggatacggtcgtacaccacaacggtatcgttgatggagtagccgaggatggtgagcatggcggcgataaagttgccgtccagtgcggtgcgcagcagcacaaaggtgccaaacaccaccatcaggtcgttgaccagcgccagcactgccatcataccgccggtcagaccgccgatgttcttgaagcgcagggcgatatacagcaaaatgagcaccagtgcaaacaccacagccaccagactcttctgcaggaacttggtgcccatggctgcgctgacattgctcagggacagctgggcaaactggttgtccgggtagttctcgttcagggagtccagcaggttctccacctgctcagtggtcacggtctcagtgccgggcatggagatcttcagggtctggtcgccggtggccacattctcgccggtctgcagggtcaggccggtgttttccagcgccgcagcagcggtcttttgcacagcggactggtcaaagcttccctcataggacagggtgatcatagcaccgccggtgaactcagtatccaaatgcacaccgaacactgcggcgcacagcaggatagctgccatcaggcaggcagagaaggtcaggaacttttttcgcagggatacgaaatccaccggcttcttttctgccttctcctgcccgggctttgcagcgccgtagagccacggattgcgcagtgccttgatggcagctgcgccacggatcataacacgggtagcgaacaccccgaacacaaagttcaacagcacgccggtgagcagtgtataaccgaaggcgtagatagtgcctgcggtagaggggccgaaggcaaagaatacaaagtgcagcgccttggcaaacaggccatccgaggggccgaaggcacccatgagcacgatggccacgatgacgatggtcacgttgccgtcaatgatgggggttagaccgcgggcaaagccgcttttcagtgcgccgtccagagatttaccgtttttcagctcctccttgatgcgctcggcggtaataacattggcatccacgcccatgccgatggccagaatgatacctgcgataccgggtagggtcagggtaaagctttcaaacaccgggaaatagccggatacaaaggccagcgtagccgccacctgaccggccagcgcgatgcaggccagaaagcccggcagacggtacagcactgtcatgaacaccacgatgagggcaaaggcgatcaggcccgccagcaccatggcgccaaggctgttttcgcccagactggggctcacggtggagtagctgtctacgctcagggcaaagggcagcgcaccggagttgatctggcgtgccatcttgaccacggcatcctgcgtaaagggattggaggcagagctggtgatgatagcctgtccgtcggtaatggcggtgttgacggtggcggtgctcacgttttcatcgtccagccagatgctgatgctgcccttatcggcggccagcttggttgtggcatcgccaaaagccttggcaccctcggtggtgaacttgagggcaacgtaatattcggagctgccgccgttgctcacagcaccgtactgtgctgaagcactttcgaccatggagccgtccaaaatcagctcgccgtccttgctggcaccctcgcggaaggtcaggtaggcggtggtgccgatctcctgaatggcagactcggggtcaaaatccgtctcgccggactgccacggaaactccagaatcaggctgtcggagttattgtccacatacagctcgtagtcagtcacgttcaacgcgaccagacggttctcgatgaccagacgggcggcatccagctgctcgtccgtggcatcatagccatccgagggcacaaaggtgacgttgacgccacccttgatatccacaccaaagcggatatcctttgcacctttgatataggtggtggtcacatcgccgtattttgctgccacgccaaaaaaggcggtgtagacaaatacaacgatcagcagcgcggtaacgaccagctgccatgctttgccttttgttttcataagtcgggaacctccaaaagcggcggctgtgcagccgcagccgtttttgttgtgaaccgcaagttttgccgacggttcctctcctcacagagcagccgtcgtgccgacctttctgtgataaaactcccctgccagccctgcaaagagccccgcagaggagaatatacaaattattttaagccttaggccatatcagccagcagcttttccacaacagccagacgcacgcagacgcacagcagttcggaagcggtctccacctcgtccagactggggtaagtgggggcgatgcgcagatgagaatcctgcggatccttgtggtacggataggcagagcctgcaccggtcagcaccagacctgcgttcttgcacagttccgccacgcgcttagcgcagccgggcatgacatacaggctgatgaagtagccgcccttggggttggtccagtgggcaatatcgccacagggggtgaggttggcggcaaaggcggtcttgacggcatcgaagcagggcaccagacggcggcggtgctttgccatgtgtgccagaacgccctccttgttcttcaggaagcggacgtggcgcagctggttcatcttatcgtagctgatgatcatcactgaaaagcgcttgcacatatacttcatgctgttgtcgctgcatgcaatggcagaaacgccggcacccgggaaggtgatcttgctggtggaagtgaacatgaacacgcgatcctgcgtgccgtacttcttgctcacgttcagcagcacaggggtctcgatgatctcctcggtcaggtggtggacgatgtaggcctcatcccagaagatcttgaaatccggggcggcggtcttcatctttgcaaagcgctcgatggtctcatcgctgtaagtgtagccatcggggttggagtactgcggcacgcaccagatgcccttgatggtatcatcctctgctaccagcttttccacaacgtccatatcggggccgttgggggtcatgggcacgctgatcagctcaaagccgaactcctcggtgatagcaaagtgacggtcatagccgggcaccgggcagaggaacttgcgcttttctacctgagaccacggacagggagactccgggaagccgaacacatagccgatgttgatgaggttatacatcagctgcaggctggaattgccgcccacgaatacctcattgggctttacgccgaacacatctgcaaacagggcgcgagcctcgctcaggccctccagctcgccgtagttgcgggcgtcggtgcctgcatccgtggtgtagtcggtcatcttcagcaggtccattgccagatccatctggtgggggccgggcttgccgcgtgccatgttcagcttcagaccctttgcctgaaactctttataagcctgttccagcgctgccttttcagcggtcagcgcatcgcgatccatctcgtgataatttgccattaaaaacacactcctttatagtactcttcctgttacccaatactatggctcgtcttttgcggtatgcccctgccagagaacacacgccgcacgatccatactttactattatagtacattttcctgtcagaaacaagaatttgaaagcaaaaagccctgccaaaagcaaaaagctttcgaagcagggcttttaggcaggtacactcccctgctgtgcggcgatgccgtcagctgagagctgcctgatttttatagcgtttgcgcacggcaccgtattccagatgtgcctcgccgccctccacggtgtcctcgtccacggtcacgcggataatggtggcatcgctgggcacctcgtacatgatgggcagcagaatgctttccatcacgctgcgcagaccacgggcaccggtcttgcgctcgatggtcttgcgggcaatggcgtgcaaagcttcgtccgtgaaggtaagctccacattgtccatgcccagcagttccttgtactgcttaaccagactgttgcggggctccttgagcacgcgcaccagcgcatcctcgtccagatcatccagcacggtgatgaccggcagacggccgatcagctccgggatcaggccgaacttgaccagatcgtggggctctaccttgcgcagcaatgcgcgctcagcctcggtggagttatccttcagcgcactgccgaagcccagcgcggacttatcggtgcggcgcaggatatacttgtccagaccgtcaaaggcaccgccgcagatgaacaggatgttggtggtgtcgatctggatgaactcctgctgcgggtgcttgcggccgccctgcggcggcacgttgctgacagtgccttccaagatcttcaacagtgcctgctgtacgccctcgccgcccacatcgcgggtgatggaggggttttcgctcttgcgggtgatcttgtcgatctcatcaatgtagatgatgccgatctgtgccttctgcacatcaaaatctgccgcctggatcagcttgagcagaatgttctccacgtcctcgcccacataaccggcctcggtaagggtggtggcatccgcaatggcgaagggcacgcccagcatcttggccagtgtctgcgccagcagggtcttgcccacgccggagggacccagcagcagcacgttggacttttgcagctccacatcgccgcccttgccgctgaggatacgcttatagtggttgtagaccgaaacggacagcacacgctttgcctcgtcctgaccgatgacatactgatccagaccttccttgatctcggccggggtcatgatgttgatatccagatctgcggcagcgggctggacatgggcgcggtttgcgttgccgcgagccggacgggcgcttttgggctgatccggcttgtcagagagcagatcgtggcacaggccgatgcactcgctgcagatattgaccccggggccaatgatcatgcgctccacttcgtcctgatgcttgccgcaaaagctgcaaaccagatccttttcgtttttgccggaattgttatttgccatagctgtttttccttatcctggatagattatagcggtttaccggtgggcaatgacctcatcgatcaggccgtattcctttgcctgctgcgcggtaaggtagttgtcgcgctcggtgtcctgctggatcttttccagcggctggccggtgtactcgctgagcatccggttcatcttatcgcggatatagaccatgtgctcggcatggatcttgatatccgtggtctggccggaaaggccgccgccctgaccgccgatcagcggctggtggatcatgatctcggcgttgggcagggcaaagcgcttgcccttggtgccgcttgccagcagaaatgcgcccatagaggcagccatgcccatgcagatggtggaaacatcgcacttgatatactgcatggtgtcatggatggccataccggcactgatggagccgccggggctgttgatatacaggctgatgtccttatccgggtcctgcccttccagatacagcagctgcgccaccacaaggcttgcggtggtatcgttgacatcctcgctcagcacgatgatgcgatcgttcagcagacgagagaaaatatcgtaagaacgctctccgtgcgccgactgctcgacaacgtaaggaacaaaactcataaagttcgcctcctgaaaatggtttaagtttattggcaaaattgaccgatacgggtcccctgtaaagttcagccgtaccggtcaattttaacaacctttgataaaacgcctgcggcgctttacagggcccggcactgattactcagcgtcagcagccttctcagcctctgcgggcttctccacgatattggcgtggctcttgatgaagtcgatggccttggtgcgagccagatcctgcttcagatcctcgaggttgatcagctcacgcaccttgtcctcttccatcttgtactggtcagcaatgcgcttgatctcggcattgatctcgtcctcggaagcctcgatgtgctcagcagcagcaacagcctccagagccagaccgatcttgacctgcttctcagcctgcggcatgaaagcggcacggaactgctccatggactgacccatatacttcaggtagtcctccagacgcagaccctgctgctccacacggaaagcaaagtcgttgaccatctcgtccatgcggacatcgtacatagcctgagggatctcgccctccatgctctcgatgacctgatcgaccagagcattctcgacagccagatcgtcctgcttgtccagctgctcctggttgttcttgcggatggaagccttgaactcgtccagagtgtcgtactcggagcagtcctttgccagctcgtcatccagagcgggcagctccttgtacttgacctcgtgcagcttgatcttaaagacagcagccttgccagccagctcggcagcctgatactcggtggggaaggtgacgttcacgtcgaactcctcgccggcagagtggccaacgacctgctcctcgaagccggggatgaagctgccgctgcccaaagtcaggttgtagtgctcagccttgccgccctcgaatgcgacgccgtccacaaagccctcgaagtcgatatcagcgatatcgccattctgagcagcgccctcacgggtcagctcacgggcgttgcgctcctgcacacgcttcagctcagcgtccacagcctcgtcggtaacagtatggacagtcttttccacggtcagaccgttgtagctgccaaccttgacctcgggcttcacggcgaccttcacggtcagggtagcgccctctgcctcgctggcagaatccacgctgacctcgggacggcccacgggctccacaccggcttccttagcggcagcctcaaaagcctccgggaacagctcgttgatggcgtcgtaggtaaagacgtctgcgccgtacatcttctcgatcagagccttgggagccttgcccttgcggaagccctgcacagggtacttcttgccctcttttttgaaaacatcggcaacagccttcttgaaggcctctgcgtcgatggagaactgcagttctgccatgctcttctcgagcttttcacacttgatgagattcatttgtttatcctccactcaaatattctattgctcagggcaggaagtttttgcccggggcaaccgcgcaccacgtccttgctgtatgcacacggaatgcggggacgcgcgcgctcaattgggtgcaacaatcgcgtcaaaacttattatagcacgctctggacacaattgccataccaaatttttaaattttgtcgtttttgcccttttataccgccgtcaattgatgcggtaggggcagaaacgcagtccgtcggcacttaccagcttgtaccggatgccgtccacctcgccctgcacggcaaaacggatggcgttgccgtgcagatgcccgtagaagcaggtcctgatgccgaactccttcagggtggccacgatctccggggcgctggtgccggtgtagaccggcggatagtgcaggaacaccagcttttccagcccgggctccgctgcctgcaagctcatgcgcagacggccgatctcgcggttcatcaccttttcatcatggggttcccccacatcgaacagccagccgcgggtgccgcagatggcgtacccttccacgctgtaagaattgttgtgcaggatatgcagggtatcgaagccctcggccttgaggtaggcgttcatcttgttggcggtggaccaccagtaatcgtggttgcccttcatgatgatcttctggccgggcagctgctgcaaaaaggcgaaatccttgcgggtatcggtcaggcgcatggcccagctgatatcccccgccagcacgatggtgtcctgcggggtgatgagcttgcgccagtttttctccagcctgtccacataatcgttccagccgggaaagatgtccatcggcttggatgcgcccagagaaagatgggggtcgccaagcacaaaaagtgccatagtctgtttactcctgttctgtctgtccgcagaagcttatgcctgatagcccagcgccacctcagcgatctgtgccggggcaatgacggtatcaaagcgctccggcttgctgcgcagggcggcaaggcttgccggtgcagcgtgaccggtagcagcttccagctgctgcatggcttcaaaatcgttttccggggcagctttgcccagtgcgctcagcacactgcgagggaacttgaagggcgatgcggtggaaagcaccaccatgggcacgccctgccgctttttctgtgcagccacatggaaggccacggcggtgtgggtatcgcacaggtagccgtccttttcgtagcgggaacggatctcccctgccacctcggcctcgctgctccagccgcaggagaaggtctcctgaatagctgccagcgtctcgggacggacggtatagttgccggttgcagccagctgctgcataaagcccgccacctcggcatcgctgccggtcacatggtacagcaggcgctccagattggaggacaccagaatgtccatgctgggcgaggtggtcttgaagaactcccgctttgcagtgtaagtaccggtggtgaggaaatcggtcagcacgttgttctcgttggaggcgcagaccagcttgcccacgggcagacccatctgctttgcgtaataaccggcgaggatatcgccaaagttgccggtgggcacacagaagtccacctcgtcaccgaaggtgattttacctgccttgagcagctgggcataggcggcaaagtagtagacgatctgcggcacaaggcggccccagttgatggagttggcgctggaaagacggatgttgcgcttttccagttcggcagcgatggccttatcgccgaacaccttcttcacgccggtctgggcatcgtcgaagttgccgcgcacagcatataccgccacattagcgccctcctgcgttgccatctgcaaacgctgaatctcactggtgccgccagtggggtagaacacggcaatctccacaccggggatatcatggtagccgtccagtgctgccttgccggtgtcgccgctggtggccacaaggatcagagtcttttcagtgcggcccagattctttttggcctccaccagcagcttgggcatcagctgcagggcgtaatccttaaaggcgcaggtcgggccgtgccacagctctagggcataggtgtccccttctaccggggcaagatagcctgccttgccgccgaaagcagcgccgtaggtgctgcgggtggcctcggtcaggaaggcggggtcgtaatcggtcaggtactccctcacaacggctgctgccagcgcggggtagtccagcccgcacagggcttttacatccacctgcggaaaactttccggcacaaacagaccgccctcatcggacagcccctgtgcgattgcctgagaagaagttactttgcggttctgatctctggtactgaaaaactgcatggtcatcgctccttttcgccacggaacgtgccgggcacgttcccggttgtacggcaaaatcctcgctttgccgcatacttcccaccggtgccacggtttctgccctaggtctcgcagagaaaggcaccctttataatatgtaccatccagcgcccgctgtcaagaggaactacctctgcaacgtcaaaacgcaccggttcttcgctttggccggtctgctgcaaatacccttgtgcagcgcagatcagccggtgctgcttggccgggtctacggcggcagcggggcgctgcagcatcccttggctgcgggtctttacctcacagatgacgatggtgccatccggctcccgcagcacaagatccagctctcccatgcgggtatgatagttatgcgccagcagctgcgcgccctgcttctgataccagcgggcagcggcagcttctcccctgcggccggtctcggcgcggttcatttgccgctctccggccagtagccctgctttttaaggaagctgcggcggtagaacggctggatgccgtactgcgcgatcagctcgtaatgcagctttgtggggtagcccttgtgctttgccagctgatactgcggatactgcttgtccagctccagcatatagcggtctcggctgaccttggccagcaccgaggccgcgccgatgctggcgctggtggcatcgcccttgaccaccggctgtgccgggatctgcaagcctgcgggggtgcggttgccgtccaccagcaccagattgggcacaatgtccagctcttccaccgcctgctgcatcccgcccatggtggcgtgcaggatgttttcccggtcgatgacctccggccccacaaagatgatgcggtaggccagcgctttttcgcagatctcgtcaaacagcgcctcgcgctttttttcggtcagctttttggaatcgttgatgccgtacaccgggttttccgggtccagaatacaggctgctacgcacacggggccgcacagcgggccgcgcccggcctcgtccacaccggcaaagcagccgtactggctgcgcacctcggcgtcaaaggcgtacagcggagcggagatttcctcgtccgagcggcgcttcattcctcgtcctccccggcaaagtcggtcagatcatcccgctgcggcgggcgttccaaagagatgcgaccccacttgcaggcgcggaactcgtccaccagcatgatagcgcagcgctcggtgttcacctcgccgccgcgcaccagcagcccgcgcttgcggccgatggcctccagcagctcatagggtggcagtgccagcgtttcggcatccagcttgtagcgctgtgccacaaggtcgggatagttgcggcgcacctcgtccagcaggttcatggccagttcttccacatccagaatatcgtccttgatggagccgataaaggccagattggaggcgatggtcttggaatcgaactttttccacagcacgccgggcatatccagcaggtcaaacttttcggtgctgacccactgcttgcccttggtcacaccggggcggtctgccgccttggcgcgggcagagcctgcaaaggtgttgataaaggtggatttgcccacgttggggataccgcacagcattacctgcgttttggcaccgcccatgccgcggttctggcggcgctccagcaggccggaaagctccttttcaatggccaccttcacggcgtttgcgccgcccttctgcttggcgctgatggccacgcagccggcatctgcggcgtggaagtagcggatccactcctcggtcacagccgggtcggcaaggtcggctttgttcagcgcatagagcttgggcttgcggtcggtgatgcgctcgatctccgggttcaggctggaaagcgggatgcgcgcatccagcagcacaaggctggcatcaacatgctggatctcctgctccatcatacgcagggtcttggtcatgtggcccgggaaccactgaatattgtactggtttgcaaaccgggtatccatttcgttcattttaccaccccaaaatctgtaaagggcataaagcacaacagtaccttgcccagaatatcacgctcgtcaatgcagccgacataggaggagcggctgtccagcgattcattgcggttatcccccatcacaaacagggtgccctccggcactgtgaacgggaactgcacatcgtagcccagataggtaggggctgcaatgtagtcctcctgcaaaagttcgccgttcaccgtgaccgtaccggcatcgtaatcaatgctgatggtgtcgccgcccttggcaatgatccgcttgaccagcggcttaccgtagacggtgtagctgtccacgatgaccacatcgccccgctgtggggtgtagcctgccgcccagacgataagcttatcgccgtgggtcagggtgggcaccatagagcgtccatccacctgaatgatgcggaagaaaaacgaaaagatcagtaccagcaccagcgctgcggagataagcgcttcgtaccattccagcatgccctgcccgcgtacagcggagggagactgctgctgtttttccatagctttgccaccagcctttcttgattttatgatacacccgggctttgaaaaagaaaaaagggacaacaagttgtcccttttctcccggtttcaaatcggggatgatcaaatatcgctcttgaccttggcagccttgcccgtacggccacgcagatagaacagctttgcgcggcggaccttgcccttgcggacaacagtgaccttctcaacgaaggggctgttgacggggaagacacgctcgatgccgacaccgtaagccacgcggcgaacggtgaaggtctctgcaacgccgccgtgcttcttagcgatgacagtgccctcgaaggcctgaatgcgctcacggtcgccgtccttgatacgaacatcaacgcggacggtatcgccaacgttgaactgaggcttttcagccttgatgctgccttcagaaataatcttcagtgcgtccatttttgaatcctccatttgtttttagacgttcatgcacggcatagccgtcagaggaccgcccgtttaatgataaatacttgtcattaaccccgctgtggtctcagcggacactaacgccctaataggatagcacaaaaccggcttgaatgcaagcaatttagcgaaaaatcttgcaaaaattttctgttttgcctgatagacggacttttgcgcagctttagacaaacagctgccggtctgccgtcaaaaacttggtgcgcagaatgttggcacttgcggcgggcaggccgaacttttcttccagaaaaccggtgagcagcgaggggttcaggttcagctcctgcgcagcgggcaggcacagttccagctgcacggtgtctcccagtacagtatagctaagctgcgggatatgctctttaaggttcacgatctttttgccgcgcttgctgtgcttttccacgggggctgtctccagcgcattatactgctccagcaccgcagcggcagccgccgggtagctgatgcggtagcaggcaaaggcgatgctgtccgccttcatttccaccggagccacccgggtaacatggataccggcgggcataatggcgttgagggcggtccgccactgggcaaaatccggggcttccgcctcggtcttaacgtccacgcactcgcactcgctctcctgtcccagcgagagcgggcaggcaaaggtcatgtagatatgggggttgaaacccagcgtatgccacaccggcagaccgctgcgcttgagcacccgctgcatcacccgctgcaggtccagcagggagatataggaggcttcatttttcttttcaaacgagattctgactgtaatcaaagcagggacctcctaacagatggttggcaccgcaggcgttgcaggcacggttgcagggcggggtggtctgggcggccagagccttgttgtactcccgcaccagatactcgtgggtgatgccgtagtccatgtgagaccacggggtcacctcgtccagcgcgatggggcgctggcagtagaaggcggggtcgatgcccaggtctgcaaaggtctgcatccaggtatcgtacttgaagcactcttcccagccgtcgaagtagcagccgcgcttataagcctccacgatgaccggggcaaggcggcggtcgcccttggcgaacacgccctcgaggaagctggtggtgctgtcgtggtagttcaccttgatcttgcggctgtgcacgctttccaacaggtgcttctgcttggcctgcagggtctcggcggtatccatgggcacgaactggaagggggtgtggggcttgggcacaaagcaggcgcagctaatggtcacctgcacgccgcgtcccttggcgtggttcgtgttcttgtaatagaggtctaccaccctttgggcggtctcggcaataccctcgatatcctccatggtctcggtgggcaggcccatcatgaagtagagcttgaccgaggtgtagcctgcattgaaagcgatggtacaggtcttttcgatctcgtcccaggtgacgtttttgttgatgacgttgcgcagacgctgggtaccggcctcggcagcaaaggtcaggccgctcttgcgcaccttggtggtcttttcaatgaggctctgggagaagttgtccacacgcagggagggcagcgacaggctgacgtgctccttgggtgcccactcgttcagatcgtccagcagctcttccagctgaccgtggtcagaggtggaaaggctggaaaggctcagttcttcgtagccggtgtttgcacacagatcctgtgctgccttgttcagcaaactggcatcgcgctggcgcatggggcggtacaagaagcctgcctgacaaaaccggcagccgcgcacacagccgcgcagcacctcgatgctggcgcggtcctgaatggcgcccaccatgggcaccacaaagtttgtgggcggggcaaactggttcagatccttgatgatggctttggtgatgcgtgcggggatgcccggctcgttgggggtgatggccttcactctgccatcctcgtggtaggtgacatcgtagaaagccgggatgtacacgcccgggatctttgcaatgttgagcagcagctgctttttggagatgccctcttttttggccttttcgatctcggcgcagatggcgggcagctggttttcgccctcacccagctggatgacatcaaagaaatccgcaataggctccgcgttgcaggcgcaggggccgcccgcaacgatcagcggccagcggtcatcacggtctttggcgtagaacgggatacctgccaagtccagcatggcaaggatattggtataggaaagctcgtactgcaaagtaaagcccacagcatcaaaggccgtgagagggtccttgctctccatggtgtacagcggcagctgcaggcgctccatctctgccttcatatccagccagggcataaaggcgcgctcacaccaccagttttcgtggctgttgagcagctcgtacaggatcttttcgcccagaaaggacattcccacctcgtaggtatccgggaagcagaaggcaaagcgcacatccaccttgtccttttctttatagatactgccgggctcgccgccggtatagcggccgggcttctgcacccgtcccagcgcttctttcagtttgggatcaaacatcgggtcctccataaacaatccgttttttgcgttctttttattttaccccaaatgtgccggttttgcaatcgtttccggcgggttgtgtgcactttccgtatttttgccgccagagcgcccctgcatacgccgccatctgtgcaccatccagcggcgggattggcaaaaggttgaacagccccgtcagcagatttgccgcccagaacgcgctgccgcggatggtagcagcttgcgcaagacgcaccgcccataccccggcaagggcaaaattgaccgcaggcccggcgacggcaagcacgaaccgctggcgcggggacagcctctcccctgccgtgcgcatacaaaagccggtcatggtcacctcaatgaccggcaaatgcctttgctggatgcagtagacgaggatgtgccccagttcgtgcaaaacagccgccagcagccccagacgcagaaaaccactggcatcaaaatacagcaacaggtacaccataccgcacagcagtaccgggtcccggaatataagcttccctgcccgcacccggttcatggagcggtctccagcagggcggcggggtcgcaggcagcgccctgctgccacagttccagatgcaggtgcgcaccggtggcgcgccctgtctgccccactgtgcccagcgtctgcccggcctgtaccacctctcccgggcggacatagaggtattgcaggtgcgcgtagcgggtctcgcagccatccgggtgcaggatgcgcagatggttgccgtagcttgggctgtatgccgccgcagtcaccacaccatcctgcactgcccgcaccgctgtacccgccgcacaggcaaggtcgagcccctgatgaaacgcagctttgccggtaaaggggtcgatccgcttgccatagacatccgagatgcgccacaccgcagtatccagcggaaaacagtactttttcgtattccgcgcggcctgcaccggtagtgcagccagcaggcagagtgccagccctgccagcaccagcgccacaacgccccaccgccgtctgcgtatttttgctgcctgtccgctccgttttgcccgcatacaccgccctcctatcccgaaaagtgtatgcacaagcaacgggcgggagaacataaacaaaaaaaacagagccgccgcacaaatttctgcgcagcagctctggcttttgtttatatgattttacagatcagcgccggaaaaagctcccaatgcgttccagcaggctctttttcttaggtgcggtgacaacaggctttacagccgggcggggtgtagccggagctttggaggcgggctgcgcagcgcggggcttattgttcagcatctgctccagcgcctcgtagtggtcgggctgctgcgccgccggggcggccttctcggccttttccggtgcaggctggaacacatggggcagctcctgtttgagctgttccacggtaacttcctgacagactgccgccgttttttccgtttccgtggctggggtggtgcacttccaaggctcaaggcgctgccaatcattgcgcagcagctcgtacatgcccatctggctgttgaccagtggctcaccctcggcaggcttcaccttctggtagttgccgctggcatccatgacccgggcgttgacgttatcccgcagctgcagctgaaggatgtcggtgagcttttgcaccagaacgggatcctccacccgcacgcccacctctacgcggcactcggtattgcgggtgaggaagtcgccggaggcaatgtagatgcgggtatgggtgccatcgaagaagctgtaaatgcggccatgctccagatatcgccccaccagactgcggatgtgcaggttctcggtcttgccgggcacctctgcgcgcacacagcagatgccgcgcacgatcatatcaatgcgcaccccggcacagctggcttcctgcaatttgaggatgatgtcccggtcgctgatagaattgtttttcaggatcatggaagccggacgtcccatgcgggcggcagcgataacgtgatccatctcgtccagcagcacgctcttgaagcgcagcggagccaccaacatcttgtcgctttcctcggtaagctgctgcacggccagattgcggaacaccttggaggcttcctcgccgatgcgctcgtctgcggtgatgaaggaataatcggtatacagctcgctggttttttcgttgtagttgccggtaccgatctgggtgatgtaggagtagccctctgcacccttgcgggtgatgagggtcagtttggagtgcaccttgtagtcctcgaagccgtagatgacagtacagccggcgctttccagctgcttggaccagtcgatgttattctgctcgtcaaagcgggcgcgcagctccaccagcgctaccacttccttgccgttttcggcagcttccatcaatgcctgcacgatctgggactcccgcgccatgcggtagagggtcatcttgatagagatgacgtccgggtcctgtgcggcttttttgagcatggcgataaaggggcgaatggactggtacgggtagctgagcagcacgtcatgcttctgtacctcggcagccagatcatagtccggcggcggcagcatggggcgcgcgggggtgtagaacagtgccggatgaccctcggcctccatgcggccggaaagcttgaagaagaagctcagatccagcgggctcttttgcaagaacacccgcttgcgggtcagttccagacggctgcacagcagccgctccacctccggtgcgggggcgggagtgatctgcaaacggacagcggccagcttgcggcggcgccggagcagctcggtcatgatctcacggtaatcgatatcgtgatccatcatgccctcttttacgtcgatatctgcgttgcgggtgacccggaacaggcatttttcctgcatagaatccttgccgaagatgctggacgcatagtgcagcaccagctcttcggtgagggcaaactgcacagcgccgtcctttttgatgaagtgcagccgttccatctggctggagataggcacgatgccaaggctctgctcctgcgtgtgcttttccttgagcagcacgccaaggtagatttccttgttgcgcaaaaacgggaacgggtggcggttatccacgatctgcgggctgaggatggggaacagctcggactggaagtattttttccagagatgctcctcttccttggtcaggtgatcgaaatccaccttatgatagccgttctctgccaaattttccagcgcttttgcgtagaatttatcacattcttcctgcagctgcgccgttttgggcataatggcggcaagctgctcggcggcggtcatgttggtcttgttttcccgcttttcctttttggtcttgctctgctcaaggtttgcgcgctcctgcaaggagcccacgcgcaccatgaaaaactcgtccagattggagccgtaaattgccagaaatttgatccgctcgcccagcgggacgttcttgtccttgcccagcgccagaacgcggcggttgaaatccagccagctcagttcgcggttgataaagatcgattcgtcactcataacaataaatctccgtatttcctctttgaccaaggcagcaagcgggctacaccctagcggacatacgcctgccctgcccatgaatccaccattgcttgggtaatgcccggaacctgtgccgcatcctccacctgtgcaaacgggccgtgctgcgcccggtagtccagaatggcctgtgcattgtgggggccgacaccgggcagggtgcacaaagcgtctgcatcggctgtgttcagttccacctgcgtatacgctgccagctcctttgtgtccggcagtgtctgcggcgtttgcgcttgcagcggcactgcaaaccggaacgccagcacagcacagacccctgcggcggcaagacacagcagcaggaacagctcctcgcggcgttttttgttttgcataggcttcttctcccattctacctgattttttgctaaaaagaaagccctctgcagaaaaattgcagaggaccttgcataagttttacacagatttttcagcggcacgcaccatgcggtacaaaacctccacggcagcgccaccggcggcatccgtcagggtgacctgcccggcggcaaggcgcagttctgccggggcatcggcggccactgcgctgtgctccacagcctgcaccagttccagcatgggctgaccgcccgccagcaccagaacctgctctgcacccacctgcgccatggtgcagacggtgtccagcatttcccgtccggagatccgcttgggggtgaggacaagggtgtccggggcaatgcgctcacccagcagggcaacacgatccccgatggccttttctgccaacgagatcaggggcacagacttgctgtcctgatacagcagcacccgcagcacctgctcggggtggatatcggcggcgttcgccagcagatacggagtccactcctgccgcagatggcgctccagtgcattgctcatgcgcagcacccgggtggtgccgtcctgcatctgcacagcaacgcccacaccgggggtatccggcaggcaggcaaaaagctcctgctgctgggcaaagctgcacagaggcacccggttgccgtcggcatagtggtaggccatggtgccgccgcacaccagcgcaggcgcagccagacgcacgctgcccagaatagagcgcacggcacgcggggagcgctgagaaaaaacggtcagtctgccgccgcggctgctgaacagctgtaaaacgtcccgcaccacctgggtcagattgccatcctcgcccagcagcaggttatccagatcacagagcaccagagtggatgccagagaatcgttcatgtgtttttcctcctgagtgttgcgagaaaatgggtaaagtagtccggcagctcggaatcaaaccgcagctgctccccggtgatggggtggacaaagcccagcgttttggcgtgcagacactgcccgtgcaggctggtgatgcagttgtgggggccgtacaccgggtcccctgccaccggatgatggatggaggccatgtgtacgcggatctgatgggtgcggccagtctttaggcggcattccagcagggtgaactcgcccagccgctccagcaccttgtagccggtataggcgtacttggtgtggggctcggtggccgggtagaccgccatttttttgcggtcggtcttgctgcggccgaggtttgcttccacaaagccctcgtcctgcgcaaagccgccgtaaactaccgtctggtaggcgcgctccacgctgtgcactgccatctgctgggaaaggccgatgtgggtggcgtcgtcctttgccaccaccagcaggccgctggtgtccttatcgatgcggtggacgatgccggggcggatcttgccgccaatgccggaaaggctgcccttgcagtgccacagcagggcgttgaccagtgtgccgtccgggttgccgggtgcggggtgcaccaccatgcccttgggcttgttgaccaccagcagatgggagtcctcgtagacgatctccagcggaatatcctgcggcacggcctcgatgggctttgcgtccgggatttccagcagcacggtgtcccctgccttgagcttcaggcttttggccacagtcttgccgttgcactgcacatgcccctcggccaccagcgcctgcagcgccgagcgggacaggccggtgtcctcgccgctgagaaagcggtcgatacgctgaccggcagtctcctgctctacgataaattcacgctgttccataatttactgctccttggaagcggcatcatcggcgtgcacttcgtccagaaagatcaccagcacccacagtgccacgcccacgcaaacgcagatatctgcaaaattgaacacggcaaagcgcatgaacagcaggttgatgtagtccactacctcgccgttgagcacacggtcgatcaggttgccgatgccgccgcccagcaccagcaccagcgctgcctgctgcaggcgcttgccgcggctgcggaagaacaggccgtaggcgaccgccagcagcgccgcgcttgtggcgatgatcaggaacagctgcttgccgctgagcaggctgaaagccatgcccggattgagcacgaaccgcagctccaccacatgggggatgaacggcatagcgcctaccggctgcaaaacctgcaccgcccacagtttgatcagctggtcaatgccgatcagcgccgccacagccgccagattgaagagtacaaatgccattagctacctcgtttctgttataaaaaacggcgctccccgttcaagggagcgccgccctttttacaaaacagatttgtattgatgcgggacgcttatgcttccacaacgctggcgcagcgtgcgcacagggtggggtgtgcggggtggctgccgatggaagcagagtacttccagcagcgctcgcacttgtcgccggtggcgtgtgcagctgcaacgcccaagccctcgacagcgctggcagcgccgccctcgcccttgaccagttccacatgggagacgatcatcaggtcggccagctcgtccatggggatgctgttcagcaggtcatagacggcatcgctgcagtacagggtgatggaagcttccagagaagcaccgatcagcttttcagcacgggcctgctccagcaccttcttgacctcatcgcgcacggcgatcagctgtgcccactttgccttgaaggcatcgtcggcggcgtactggccagccttgggcatctgctcaaacaccacatacttgttcataccctcggtcttgggcatgaagtcccagatctcctgactggtgaagcacagaatgggggcaatgatcttgtccagagcaacaaggatcttgtacatggtggtctgggcggccttgcgggcggtgccgttggtgcagtacagacgatccttggtgacgtccagatagaagttggacatggccaccacgcagaagttgtacacagcgtggtagaccttattgaagtcgtacacagcgtagcctgcgttggtgttggcgatcaggtcatccagcgcagccagtgcccagcggtcgatatcctgcagctggtcgtctgccacacaatcggtgttggggtcaaagccgtccagattgcccagaatgaagcgggcagtgttgcggatcttgcggtaagcctcgctgagctgcttgaagatgttcttaccggcgcgcacatccacggtgtagtcggaagaagccacccacagacggatgatgtctgcgccgtagtccttgatgatctcgctgggctccacgccgttgccggcgctcttgtgcatctgcttgccctgctcgtccacaacccagccgtggcacagcacggacttatagggtgcgcagcccttgcttgcaacgctggtcagcaggctggactggaaccagccgcggaactggtcgccgccttccatatacatatcggcggggaaacgcagctcggggcgctcgtccagcacggcagcatgggtggagccggagtcgaaccagacgtccatgatgtcggaatccttctcccactcggaagcgccgcacttctcgcacacttcgcctgcggggatgatctgctcggcatcgtacttataccatgcgtcagagccttccttgcggaacagggcgctgacagccttgatggtagcatcggtgatgtggtaggcgccgcacttcttgcagtagaaggcggggataggcacgccccaagtgcgctggcggctgatgcaccagtcgttacggtcgcgcaccatgccggtcatgcggtcatggccccaatccggcatccaagtgacggtatcaattgccttgtacacgtcctcgcggaacttggcaatggagcagaaccactgttcggtagcgcggaagatgatgggatgatggcagcgccagcagtgggggtactggtgcttgatgtgcacctgacccatcacagcgccggaagcagtcaggtcggccagaatggtcttgttggctgcccacacgcgctgcccagcgtacttgccggccagctcggtcagataaccgccgtcatccacaggcaccgtgatgggcacctgcggatacttctggcagacgttgaagtcgtccacgccgtgaccgcctgcggtatgaacgcagccggaaccgctttccagcgtgacgtggtcgcccagaatgacccagccctccttgggcaggtagacgtggttatagcgcatcagctcgaactcagcgccggaaacgggctcgcccacgatctcatagttctcgatgtggcaggcgtccatgacgctcttgaccagatcggtggccatgatgtggtactcttcgccgatcttgacgaaggagtactcgaactgaccgttcaggcagatggcctcgttggcgggcagggtccaagtggtggtggtccagatgacgaagtaggtcttatccatggggatgccgtactttgccagcacaccgttgggatcctgcgagacgtggaaacgcacaaagatggaatcgcagtcgtcctcgccgtactcgatctcggcctcagccagcgcggtgcggcagtccgggcaccagtacacgggcttgaggcccttgtagatgtagcccttcttggccatctcgccgaagatctcgatctgacgtgcctcaaactccggcttcagggtcaggtaggggtgctcaaagtcaccgatgacgcccagacgcttgaactggtcgctcatgatgtcgatgtgctcggtggcaaacttttcacagatctggcgcagctccagcttggagatgtccttcttcttgtcacccaccgaggacagagccttcagctcaatgggcaggccgtgggtatcaaaaccgggcacatagggagcctgatagccctccatgttcttttcgcggatgatgatatccttgatgatcttgttcagggcggtgcccatgtggatgttgccgtttgcatacggagggccgtcgtgcagaatgaacaggggcttgccctcgttgtgcttcatgagctggttgtacaggtcgttgtcgtcccagtccttgagcatgaccggttcctttttgggcagaccggcgcgcatctcaaacagggtcttgggcaggttcaacgtactgtcgtactgcgatttgttcttagccaatggtttacactctcctctatttttgcgttgggtgccttactcgctgaactttacgccctgaaaagcgtcgtagtccggctcgtccggcttcatatcagcaggaggcgggtccagcttgagctggctttcgtcctttgcccagaaatcctcgctgctgtcagccgccttgtcgtcatcggcaggggcggcaggttcggtggtttcggtcatttcggcaggttgctcggccggggctgctgcggcatcggctgcgggggcagtctcgggctgtgcggcgggctgctctgcggcagcttcctgcacaggctcggcatcctgtacaggggcgtccttttcggcttccttagcgtccttctggaactccggcagacggctcaaagactccacatggctgcggtacaaattgagcacatccgccttgaagcgggtgacctccagacggacgcggtcgtactcccgctcttcagccagacgcttctcgttggcttcgttctcgatctcgtctgcgcggtcgcttgccttttgcagcagctcgttggcgtcgcggatgatatcatcgccccgcagatttgcgcggtgaatgatctcctcagccttctggtttgcttcacggatcacgttttcgcccatgcgctgggcgttgatcagcgcgctcttgagcatatcgccgtcggcctcaaagctttgcagctcacccttgagcttctggttctctgcggtcagatcagcgatctgcttgcgcagctgctctgcctgcgcatcgttctgctgcagctgctcctcgaccttgtccagaaaacgatccacgtcctctgtacggtagccgcggaggtttttttcaaattgtacagagcggacatcctgcggagtcagcatagtcatttcctcccatagcttttaatattgaaagaactcaatgatcgaacgatcttttttacttttcccgggcaacgcagtcagccggaagcggcccttgccgcgcacggtgaacacatcctgctcgtatacgggggcatggggtttttccaccggcagatggttgatctctaccctgcccgcctcgatcagctccgcagcagtgccgcggctgacgtgcagcatagcagaaagcaccgcatccagccgcagggaggacacagtagcggtgagcagctgacgctccggtgccgggaaagccgggatctcttccggctccagcaggcgggtggacacctctgtgcgtcccgcctgacacagctcccgacagataagctttgccgccggttccagcgcgaacacataagctgtgcccggcgcatcggcaggcagcaggatatcgcccagtgcctcgcgcttgagggcaagccccatcaggctgcccagatagtccttgtgcgcggggagcgccgcaccgggcagtgcccggcattgcagctgtacgcagcgcaccggacactcgccgtagctgtactccggctccagacagagcacccggcgctcggcctcgggccagccgccgtcaaagcgccagccgtcccgcacaccggcacgtcccagtgccgcccgggcaagatcctgttcccggtcgctgaggaatgcagagtaccgggctatgccgcgggaaaaagccgcatcggcaagatcctcgatatgccgcataaggtagcgttcctcatcgttgcgggcgggcacaaaaccccgcaccgcaccggttgccggatcaatagaatgcgccattgttctccagctcgtccagcagatcgcccataatatctacgttgtacggggtaatgataaaggtgctgttggctacgcgcttgatctggccgttgttggcataggccacgccggacaaaaagtctaccagacggcgggagacctccttgttggtggactccaggttcagcaccacggtacgcttgttgttcagatggtcggcaatggtgctggcatcctcgaaccgctcgggcttgaccagaaccaccttgagctgagtggtggcatggatgttgaccaccttgttcttcttgctggtgccctcggcaggctcctcggtctcttcgtccatcccgatgccaacgccgctgttgttgttcaccatctgggggccgtcatcgatgtactggtcctcgtactcgtccccttcgcccatcaggcccttcttaatgctatccagcaaagacataattatctgctcctttcattcgggcagcgcccggctgcctggcgttctttgcaaaaagaatgcaaatagcttttactattatctgatttttttcagcagatgtcaataactacaaaagttttccgtcatataaattttgtccggagacgattatttcgtcataaagccttacctgactgacagaaccgtccgttcccttgggcaaaacaaggatgtaatcgtcttccgagatcagcggatggtcggcatccaccgggtcgatcttacagaaacgggcgatgttgccgtacttgacgtacacgccgggaatatagttttcgccctgcatctcggcctcggtgccgtcctccttgaggtagtgcaccgctgcggcgggaacccgcaggccggtgctctcgccggtgctaatgcgtgcgcgggcgtggttgaggcacagcacatcgccgttgatggagttgcattgcagcacaaagcgggcaacatccttttctgcatcaatggtcacctcggaaacggtggcgcgcaaggcagcatcgctctggccggggaagctgatctccaccgccgtgcgcaggggcttaccgtccgcgcccagcagcttttcggcctgctttgcggagcacaccccggcgtactgccagctgaacccggccaccagcttgcctacgcagccatccagcggcatctcggggtcagagtccagataggctttaagctgctccgggctctgcgccagaatgtccgcagcaccggcattcagccgtccgctgctggcagctcggacaaagtagccggtagtgggggcggcgatctgggtggggttgcccagctgtgcctgcacggtctgtgcctgctgggcaagcagcgcgatctgatccgcaaagccggcggtatcgccggtggtgatccacagcttgttctgcgccagcaaataggcatcggtgctttcgtccacatcgctgtattgggcggtgtccagtgcgtccagcaggtcatacagcgcaccggagcgctccttgagcaagccgtccagctgggtggctgcggtgttctgggagcgctgcaacaggtcgatctggctggtgagctgggtcagctgctggcgcagcaccgcctgattggcatcggtatacagctctgcaacggcagtgcctgccgacacccgctcgccgtccgagacaaggtaacccagattgccgctgccggaaatgcaggtctcgtcaaacagcagcacgccgtccgcttcaatggtatcggagatggtgatgggcagcgccgtttcgtagacgttctgggggaaaaggatgtgcgccgcctgccagcagacatacgctgccgccgccagcaaaaaggtggccagcacagccgccagcgtggtgagcgcagaaaacttgtggcgcggttcctgaggggtttccggcataaggatcatcctttcaataaaaagtcttgggtcaggcgcaaagcggtctgtcgcacgtccgccgccccggcgtccagccatgtaaccccgtccatgtggcggaaccatgtcagctggcgcttggcgtagttgcgggaagcctgtttgagtttttcagtacaggcctcaagcgtggcggtctgctggaaatacgcaaaaaattctttatagccgatggcctgtgcggcggtgcggaagacttcgcggttgcgccagacgtattccgcttcggctaaaagcccggcctccagcattttgtccacccgcaggtcgatgcggcggtacagcgctgcgcggtccgggaagtccagccccagcacaaggctgcggtaggggcgctccggcggcagcgaatcggccttttgttcgctgagacgcttgccggtggcgcggtagtgttccagcgcccgcagcacccgtaccttattattggggtggatggcagcagcggcttccgggtccacggcttgcagttttgcgtacatggcttccgggccgttggcttccagttcagcggtcagctgctcgcgcagaccatccggggctttttcggcggtgaatcgcacaccatataaaaggctttgcacatacaggccggtaccgcccaccagcagcggcagatgcccccgggcagtgatatcctggatgtactcccctgccagcgcggtgaaatccgccacgctgaaggtcttttccggggtgaggatgtccacgccgtggtgcgggatgccgcaggtctcctgcggggtgaccttagcggtgcccacatccagacctttgtagatctgcatggagtcggcactgatgacctcgccggagaactgctgcgccagcgcaacgcccagcgcggtcttgccggtggcggtgggacctaccacagccaccacggcgggttttgcattacacgatgcgtccaaactgcttttccaactcctttcgggtaagcttgagcacgcagggacggccatgggggcagaagggcggcacctcgccggagaggatcttctcggccagtgccatcagttcctgcggggaggacttatcccctgccttgatggcggcgcggcaggagatggagtgcagcacccactcggtgtgctcgttcagcgcgtcccggctgcccttgagcaggcggtcggcgatctctaccaatagatcctcggcattctgcggctctacgtccgcaggcacagcgcgcaatagcaccgtactgccgccaaagtccgccacatccagcccggcgttttccagcaggggctgattttccagcagcgcctgcttttcctctgcagagaggtcgatggcggcgggctgcaacaacagctggctgggcacgttgccgtagttcgcggccagcttttcgtacagctgacgctcgtgggcggcgtgcttatcgatcagacacagctcgtctccccgctccgccagaatataggtgcggaaaacctcgcccacataccgcagcggctcttccccctgcggtacatcaaagcccagctgttccggctgctcggactgcaccggctcctccggctgatagggcaccgttgcagcttcgatctccggggcggcaggcacggtgttccatgctgccatatgatccagcggcgggtcggctgcggcgtccgtctccgggcgcacatccagctgtgtttcagcagcagcagcccggaagggctgcgctgcgggctggacttcggttgcatctgctttttccgggctgtggagggtgaccaccgggtccaggatatcctctgcggggccagactgccgccacgagggcacggtagcagccgcgcgggcaggctgtgcaggctgtaccggcggggtgtctgccgtaaaagacggggttttcaccggtgcagcggcagggcgcggcggctgcggggcttcccagcgctgcgcgggcagcgtgccggggtctgcctgacccggaatgacggcagaaagtcctgtaaagcgattgttctttacagtattttcgctttgtatatcgttttctttttcagttttctctttttcgtctgcttcaaaggtgaagcgtcgctccccggtgccgggctgtgccagcgccagcttgaccgcatggtaaacgacatcgaacacgtcattttcccgggcaaagcgggcttcgatctttgcagggtggacattgacgtccacaaggtcggtgggcatttccagcagcaagatgccgcccgggaacttgccctgcatggtcgtacccttaaaggccatttccatgcccgccatgatggtacggttgcgcacatagcggccattgatgtagaaatgctgcatactgcggctggcgcggcagctcttgggcggggtaatcaagccggtgacccggtacagcccttcctcggagtgcacctcgatgaggtcgcggctgaactcacgccccagcaccgcgtaggcggcgctgcgcagctgaccatcgccgggggtgacgtattgcagcttgccttcccggatgaacttgacactgacctccgggtggctgagcgccacatgacccacgttatctgccacaaaggtgccctcgctggagtcctttttgaggaacttcatgcgggcgggggtgttgtagaacaggtcctgcacccggatggtggtgcccacagcacgggcggcaggctccctgccctgctcctcgccgccggcgatgcggtagcaggtggcaaactcgtctaccacggtgcgggtgagcagctctacccgcgctacgctggcaatggaagccaatgcctcgccccggaaccccagcgtatggatgctgttcaggtcgtctggtttttcaattttgctggtggcgtggcggatgaaggccgttgggatatactcggcatcaataccggtgccgttatcgctgatctcgatcagctttacgccgccggactcgatactgacggtaacctgcgttgcaccggcgtcgatggagttttccagaagttccttgaccaccgatgcggggcgctctaccacctcaccggcggcgatcagctccgcagtatgcttatccagaacatggatgactgccatggtcttttccctcccctgtggttgattcttgcggtcagccgttcaggctgcccttgagggtctttttcagctcgtacaaaaagttcagtgcttcaatgggagtaagcgtttccacatccacagcttccagcttttccatcatctcgctgggcactgccggggaattatactcctgcaaggcgtcaaaatccatctgctccaccttgtttttgggcgcagatgcttccagcgtgcgcagcacctcgtgggcgcggcgggtcacgctgccgggcagaccggccagctttgccacctcgatgccgtagctgtcgtcggcggggccgcgcacgatgcgccgcaggaaagtgatatcctcaccgcgctttttgaccgcgatgttgtagttttttacgccctccacggtgccttccagctcggtcagctcgtggtagtgggtggcgaacagtgtcttgcagcccagccccttggcgggatctgcgatatgctccaccacggcgcgggcaatgctcatgccgtcaaaggtggaggtgccgcggccgatctcgtccagcaccacaagacttttggcggtagcgtttttcaggatctccgccacctcggtcatctccaccataaaggtggactggcctgcagcaaggtcgtccgatgcaccgatgcgggtgaagatggcgtccaccacgcccacatgacagctggctgccggcacaaaggagccgatctgtgccatcagggcaatcagagcattctgacgcatataggtagatttacccgccatgttggggccggtgatgatcaggcagcggtcggtagtgcagttgagggtggtatcgttgggcacgaacatactgcccttgagcacctgctccaccaccgggtgacgcccctcggtgatggtcagcacatcgctgtcgtccaccacggggcggcagtagttgttttccgcagccacctgcgccagcgcagccagcacatccagctgagcaatggcgttagcggtgcgctggatgcggtccagctgggcaccgatgctctccagcagttcgtcaaacaggcggcgctccagcgagatgagccgctcgtgtgcgccaagaattttgctttccagctccttcagctcctgcgtgatgtaacgctcgccggaggtgagggtctgcttgcggatgtaagtctccggcacaaggtttttgtaggagttgctcacctcgatgaagtagccgaacacatggttatagcctattttcagcttggggatgccagtctcctgccgcaggcgggcttccagctgtgccagcacgcccttggtgttatcgcggatggagcgcagctcgtccacctcggcatggtagcccttggcgatgacaccgccatccttgagggtggagggggcatccgggtctactgcggcataaatgcgcgccttgatatcctccagcgggtcgatacttgcggccagctcggcaagctccgggcagttgcagccctctgcctgcttgcgcagaccgggcagacggtcacaggtctgggcaagggtgtagatctccttgggggttgcagagccgtacaccgtgcgggtcatcaggcgttccagatccgcaatgtagtgcagctcctcggtcaggtcgccgcgcaccatggtctggcgcaccagcgcctccacagcgttcaggcggtggttgatgagctggctggaaataagcggctgctcgatccagctgcgcagcatccgcttacccatggcggtgctggtcttatccagcacccacagcagggtgccgcgcttttcgcgcccgcgcagggtctcggtcaattcaagatttgcccgggtgaccggcgaaagccgcatgaactgggcttcgttgtaagtaatgaccgtctttaaccgctccacacccttgatctgggtatcgtgcaggtattccagcagggcggccatagcaaagcgcacaaggccctcggcagctatgccggtggtctgcggccagtcgcggccaaactgttcttccagcgcagacgccaccagccccggcgcatagcgctcgtcctcgaccagttccaccgagcagttcatgttctttttgatgtaggcggtcacctcgcggcagtccagcaggccgggattcagcagcacctcgctggggtggtagcggcacagctcggtaatgaccgccggggcgatcttatccgccgtcagttcggtgatatgcgccgtaccggtggaaacgtccgcaaagcacaggccggcctttttgcccttgaggtacaggctggcaatgtagttgttgcggtcgtcctgcagcatactgctctcgatgaccgtaccgggggtgaccacccggatgatgtcccgcttgacaaggcctttcgccttggcggggtcctctacctgctcacagatagccaccttatagcccttagcgatcaggcgcgccacatagccctcgtagctgtggaagggcacgccgcacatgggagcgcgctccgcaaggccgcactgcttgccggtaagggtaagatccagctcccgggaggccgtgacggcatcgtcgaagaacatctcgtaaaaatcgccgatgcggtaaaaaagaatttcgtccttgtgttgatttttgatttcaagatactgctgcatcatgggcgaaagctctgccatggtttttcctctttcccttgtatggttccgtcagccggtttgcgggctgtaaccgccggtgcaaacaaaacgcggtctgtgttgcacagccgcgttccggtcaaaaaagtttgctcagtggcagccgccgcaggtggaacagctgccggtgcaggaggcagaaggctcctgcacggtcatggggtcgccgccgttcatggcggtgttgatgatggcgtcgatatagttgaccaggttctcgcactcgcgcttggcctcgttgtatgccaccatgccctcgttgcccatgatctggccgtagagactgttcaccttctcgttcagctcagcgatacgggcgtcgtcgcgctcgttcttgccgatctcgttgttcaggtccatgcgggccagattgaactcgccgatcaggttctgcagctcctcatccttatcgtttgccttgcgggcctgatccagaatgacgtagcgggggtcggtctgaagtgccatagcggcacgcttgaaaagatcaatgcaatccatgattgggttctccttgttgtttttattctttctggggcagtttgccccggaatcacttttttatgcttccagctcgcccagcagcacggtggcgcgggcaccggtaagatgtacagtcgcgtagctgcccagcagtgccgggtcggcagcaaactccacggtcaggttattgtccaaccggccggaaagggtgccttcattgcgcccaaagccttccaccaatacccggacgatctgccccacctgcgccttgaccagcgccatggcgatctcgtcctgcgtagccagcaggcgggtcatgcggtcggtcttttccttgcggggggtggggtccggcatttcggcagccttggtgccagtgcgcttggagtagataaaggtgaacagctgcatatagcccaccttgcgcaccagttccagcgtttttacaaagtcctcctcggtctcgccggggaaacccacgatgatatcgctggagaaggtgatgccgggcacggtcttgcgggcgtaatcgatgagctccagatactgctccaccgtatagtggcggttcatctgctgcaaaagtcggtcggagccgcactgcaccggcagatgcaggtgcttgcacagcttcggctgggcggcgatggtatcaatgagcttatggctggcgtccttggggtggctggtcataaagcggatgtggtaatcgccgggcacggtgcacagcaggttgagcaggtcggagaaatcgatctgctcctccagccccttaccgtagctgttcacgttctgacccagcagggtgatctccttatagcccgcttccacaaggctgcggaactcggcaaggatatcgccgggcttgcggctcttctcgcggccgcggacgtagggcacgatgcagtaggtgcagaagttatcgcagccgtacatgatgggcagccatgcgcggaactcgctctcgcgccggatgggaatgttctccacgatgaccggacgctgtgcggggtccagcagcacccgcttatgcttttgcagtttctgggcgatcagctgcggcagggtgtcgatgccgtccacgccgaacaccagatccacataggggtagctcttgcgcagcttttccacaacatgcttctggttggccatgcagccgcacaggccgatgataaggccgggctttttttccttgagccccttcagcgcgcccacgttgccgaacacccgctgctcggcgtgctcgcgcacagcgcaggtgttgaacaaaatcaggtcggcatcctcgggcctatcgcacaggccgtagccgatatctaccagcacgcccttgatgcgctcgccgtcgttgacgttctgctgacagccgtagctgtgcacaaaggccagcggcggggtgtcgtaggtctgccgcaccagctcggcggcaacggtattatgttcaaagttaatgtattccaaaaaaaccatccttctccgccgggcagggtagccccgtgcggcgaaactctattttctgccattctataaaagacactctttagtataccctgtttggccgctgcgggcaagaggaaacacgcaaattttatgcctgtttagccgctgccgcctctgcatcctgcctgcggcagcactcttcgcacacgcccagcagcaccacggcacaatcctgcaccctgcccttctggtttttgaccagctccatcacctgttttccgtccacctctgcatcggtgacgccgccgcagacggtgcagtacaaatggctgtgccacggcagggtgtggtcaaagcggtccgccttgccgggaatggacacccggcgcacccgcccggcttccaccagactgttcaggttgcggtatactgtgccaaggctcagattcgggcactcctgcgcggctttatcgtagatttcttccgcagtcgggtggtcgcacagctgctgcaccgtctgcatgacaagctcccgctgttttgagtaacgcatatccatcctcctttttcacacggttcagacgttttcttcccctttgatctttgcccagtacgcccgggcggcctgttcggtcttgttgtcgccaaaggtgtagtacttggtatccttcagcacatccggcagatactgctgctgtacccagtggttggcgtagctgtgggcgtatttgtagttctgcccctttaccagcgcatcctcgccgtcaaagtgcttgttttgcagctggcgcgggatgggcccggtgcgcccggcctgcacatccgcaatggctgcgttgatggcatcgtgggcgctgttggatttggggctggtggccaccagaatgactgcatccgcaagcggcagacgcgcctccggcagacccaccatgttggcggcatccaccgccgccttgacgatagggatgatttgcggataggcaagccccacgtcctcgcaggcgcacaccatcaaccggcggcaggcagagggcaggtctcccgcctccagcaggcgtgccagatagtgcagcgccgcgtccgggtctgacccgcgcatggacttctggtaggcggacacgatgtcgtagtggtcgtcgccctcccggtcgtagcgcatggcggtgcggcgggtgacctgccggatcatatctaaggtaatgcgtttttctccgttttccaccggcgctgccgtgaccgcaaagtccagacagcccagcgccttgcgcagatcgcccccggcgctttcggccagataggcgcaggcgtcctcgtccatgcataccggcacctgttccccttcggaaaggcgctgcacggcgttgcgcactccgcgctccacgtccgctgcggcaaggggcttgaactcaaacaccgtgcagcgggaaagcagcgcattgtagatgtaaaaataggggttctcggtggtggaagcgatcagggtgacactgccgtcctcaatgcattccaacaggctctgctgctgctttttgttcaggtactggatctcgtccagatacagcagaatgccgcccgccgctgccagcgtgccgatatccttgagcactgccttgatatccccggtgccgcaggaggtgccgttgagcttgtgcagggtcatgccgctgttctcggcaataatgcgtgccaccgtggtctttccggtgccggagggaccgtaaaagatcatgttggggatgcgcccgctctcgatggtgcggcggaacacccgccccggagccagcagatgctgctgcccgcacacatccgccagcgttttgggacgcaggcgctgcgcaagtggttcattcatggtggtttctcctttcctgcccgcaaggcactttttatatagtatagcgcatttagaaaaggaggacaagggcttttctgaaaatcattctcagataatgccctgcaaacatttacaaatcctgtcaaacatggtatgattcaggtattcccttttaaaggaggtttgtcccatgtcggtacgaaaaaaagccccggaggatcttaccgcaaaaaaagcgctggcgctggaggtcatacggcgtctcaaggccgaatacccggatgctggttgcaccttggactacgaccacgcatggcagctgctggtcagcgtgcggctggccgcccagtgcacggatgcccgggtgaacattgtggtggaggagttgtttgccaaataccccagcgtggcggcgctggctgccgccgagccggaggacattgaagccatcgtcaagccctgcgggctgggacactccaaggcgcgggatatctcggcctgtatgcggatgctgcgggacaagtacgactgccgtgtgcccaatacctttgaggagttgctcgctttgcccggcgtagggcgcaagagcgcaaacctcatcatgggggatgtgttcggcaagcccgccatcgttaccgatacccactgcatccggctgtgcaataagatcggccttgtggacggcattaaggagccgcaaaaggtggagatggcgctgtggaagatcatcccgccggaggaaggcagcgacctttgccaccgctttgtgatgcatggccgtgcggtgtgcaacgcccgcaagccggaatgcgaaaaatgctgtttgaaagacatctgccgcaccgcccgcgaagccgccgggcagcaggcagagccataatttttaaggaggtataacctatgatcactttaacgattttgcttatcgttgccctgctgtgcgtgctggtgggctgcctgaccggcctgctgacgctggtgggcgtgctggcctccctttttgtgggcgtgctggtgggtgcgctggccggatatctggccgggcgctttatgggcacggaaacttcccttggccgtaacatcctgatgggcgtgctgggcagctttgtgggcgagtttttgtttggcctgctgggcatccacgcctccggcagcttttcttcctttgccatctcggtggtcggtgcctgcatctgcatttgggtcggccagaagatttctaagtaagtttttgggctcaatacgccgccgcattctgctgccggagtttccgggcagggtgcggcggctttgcttttccgcacaaagcaaaacccccgaaaaccggcttcacaagccaactttcgggggtttttctttggagctactgacctgattcgaacaggcgacctgctcattacgagtgagctgctctaccagctgagccacagtagcacattgcacatctgctgcaacaggcaatattttaccatatttctgcggcactgtcaaggccggatttcctgtaagcggagcaagcttttgcaaggcgtttcacaaaaagttattgcattttagcccggcggctttataatagaattgattgcgcaaaaggccgtgccttttgccggaaaggacgagctgcaccatgatctttgttcccctgctgcactactttttgtgcaagaatgattacagcggcaacgaagccgggctgcgctaccggcttaccccgggcaagcgcaccgtgccggacccggacggcggcgcggatgccaccaaagaggaaaagatcctcacagtggactactggcccgcgccttggacgatcgacaagaccgatcccgccctgcgccgccgggaggtatttccgcttacggacgaagggcgtgccgccgctgcgcagtatctgaaagacgcctacgatgccgagccggagcgctggaacaactgcccggacatgatggactgcgacccttgggagccgcccgccgagccggatactgccaacgaatgaaccgaacgaggaaaccatgatctaccgtttgaaagaactgaagggcgatacgatcgccgtgccgcagctggtgttctccaagctgggcattgccgaagaatacaatgtgcgggtggcgctgtatgtgctggccaccggcgtgaccgacccggacaagatctgcgccgacctcaagctgcgcagccgcatcagtgcagaaagtgctctggcgttctgggcaggtgcagggcttttggagcgctacgaagaaaacgccgcgccgggcgcagagcccagcgctcccgcccccatgcgctgggcggagatcgccgccgccagccgcaccgaccccatgatctccagcctgatcgactgcgggcagaccagctttgcccgtccgctgacccataccgagatggaaaagctggtgaacctgtatgtgcaggagggctttgcgcctgagactgtgatgctctgcgtagcctatgtggccagccggggcaagcgcaccatggccgctgtgacccatgagctgaaggtctggcgcgctgagggcgtggagaccggtgagcaggccgatgcccacttaaagctgctggcgctgcgccaaagccgcgaggaatacgtcagcagcctgctgcagatcacccccgaggagctgacgctgggcgggcgcaaggccattgcgcgctggtacgaggtgtacggctacgacgacgccatggtgcaggaagccgccgtacaggccggccccaagcgggatctgtggtactggaacagcatcctgaaaacatggaacgccaaggggctgcgcagcatccacgatgtgcgcggcccggtggccgcagccggagcaagccggaatatccgggtagaccgcgacacacccagcggaaacgatatcctgaaaaacgccacccgccgccgttccctgatcaagaaaccggagtaaggagcctttatgcgtaccaaaaacgaattgtatcagcaggcattgcgcaccgtggccatgcggcggcagaccgcccgcgccttggcacaggatgcacaagccgaagccgaagccgccattcccgggctgcgccacgccgaggaggaagtgcgggtacggggcatccgctgcgccattgccggagcttccggcaaggaccgtaccgagactgctgctgcccttgcggcggcaaagcagaagctgaccgccctgctggctgagagcggacgccctgcggatgcgctggagccaaagtttacctgcaagcggtgcgaggacactggcgcagtggacggccatacctgcgactgtgtgcgccgggtgatgcagcagctgcgccggaaggagatcgaggaactgtccagcctgtctgtctccagctttgacaccatgcagctggactactaccccaacacggtggacaaggcgctgggcgagagtgtgcgcagctacatggccgaggttctggctgacctgcgggattacgcggcagacttttcccccaccacccgcgaaagcctgctgctggtgggcaacgcagggcttggcaagacccatgccgcccttgccattgccggtgaggtgctgcgacagaactacgacgtgatctatgtctcctgcccggacttttttggcaagctggaagcgctacatttcggcaccgaccccggcggcgaggaggaggccttgttccagactgcctgcaacgctgatctgctgattttggatgatctgggcaccgagttcaattccagcttcttcctgacgaatctgtacagcctgctgaataaccgcttgggcgcaaagctgcctaccatcgtcaccaccaatatcacggacggtgcgctgctggaaaagttgtatacagagaagatctccagccgccttgcggcctttgtgcagatccagtttttaggcagtgatatccgggtacagaaagccgccgaataagtcgtttcatttctgccggagccgtccatctttcgagagaaacaattgcaaaacaaatgcgcagcacctcgtaaataaaaagccatctgccgcagcatgaccaggggcgaaaccctttgaatcagctgttgcagatggctttattgtttgataaatcagaactccagtgcagggcttacctcgttgcggcgctgtgcctgcacgatgcagtctttttccggcacgacaccggctgcacccaaggtggtgaacacggtctgcagggcaaggctgggcgtgttattctcctgcgagagatggcacagagcgaactttttgcagccgctctggatcagctccaaaagctttgcggagcactcgtcgttggaaaggtgtccccgcacgctctcgatgcgggcgcgcagatagtaggggtaaggcccgctgcgcagcatatgcaggtcgtagttgctttccagcgccacaaggtcgcagccggaaagcgcttcgtgcaccggcggggtcagggtgccaaggtcggtggcgatggtcatggtcttatcgtccggggtgtggatgcggtagcccacacagggcacgtcgtggctggtggggaaagactgcaccccgaagcagccgatgtcctcttccctgccctccagcgcgttcagcgcacagttggcgggcacgatatcgttggcatccagaaaatccagcgtagccgctgcgccgtacaccggcagcgggttctttttcaggaaggtggaaagccccttgacgtggtcgctgtgctcgtgggtgacaaggatgcctgcgcaatcgctgatggcaagccccagcgatttgagcgctgccgtggtggtgcgcacccccttgcccatatccacgataaggtactgtgcgccgcagcgcaccacgctgctgttgccggaggagccggaatacaatgaaatgaactctgccatgaaaacctcttatgttaccacctgaaaacagcccgccgcacagaacttacggcaggctgtttgttttgttgtttgtgttacagggcctgttccagcgcagcgggcatccgctccaccttgctgatctcagcgcccagaccgcgcagcttttccacgatattctcgtagccgcgctcgatatggccgatctcctcgatctcgctggtgccgtcagccatcaaagcagccaccaccatagcggcaccggcacgcaggtcggaagcgcgcagcggtgcggggctgagcttttctacgccctcgaacacagccacctgaccgtccacctgtacgctggcacccatcttgcgcagctcgtccacatagcggaagcggttgtcccacacgctctcggtgatggtgctggtgcccttggccacgctcagcagcacacccatcaggggctgcatatcggtggggaagccggggtgcggcatggtgttgatcttcagcggcagaatatcgccggtgcgggatacccgcacagcatcgtcaaattcttccacagtaatcccagcgcggcgcagcttggccgtgatgggttccaaatgcttgggggtgacgttcttaatgagcacatcgccgccagtggcagcagcagctaccatatagctgccggcttcgatctgatccgggatgatgctgtaggtgcagccgtgcattttttccacgccgcgcaccttgatgacgtccgtaccggcaccgcgcacgtctgcgccgcacatattcaaaaaatttgccagatccaccacatggggctccttggcgcagttttccagaatggtctgacccttggccatgaccgcagagagcataccgttcatggtagcgcccacgctgaccttatcaaagaagatatgggcaccggtcagctcctgcttggtgcgcacagtgatcatgccgtaatccacgctgtcctctgcgcccagcgcgctgaacaccttcagatgctggtcgatggggcgggggcccagattgcagccgccgggcatggcaacctgtgccttgccgaagcgggagagcaatgcgccaaggaagtagtagctggcgcgcatctggcgggacaggtcgtccggcacattggtggtgaccagatgccgcgtatcgatctcgtaggtgttgcggttgagcatcttcacctgtgcacccaaggtgctcaggatcttgagactgaccgacacatcgctgatatcgggcagattttcgatcacgcagacatccgctgccagaatggtggcaggcagaatacccacagccgcattttttgcgccggaaatagtcacttctccgtgcaggggcttaccgccggtaataacaaatttctccacttttatgatctccttgtcaaaggcctgtgccacaggcctgttaaggctactgaaagcattccatctcgttacttataccgccggggtgtacagattcaccaacaccggggcagatttataactatcctattatacactacttccacaaaaaagcaaagcccgatttgtatctgtttcattattttctgttttgcccagattacacgcggatattccaataatttattgaatttttcatcaattttgacgaatgccgacccaaatttcaccctttggcgatatcaccaaacgtgatcctcgcaccgtgcctccgggatccagcccagctgataggctgttaccagctgcttgaggtcatgcacgcgttcccgcagtacctcgccctcgtccgtatcttccacgaggatgcgatgattttcggtttccagaatgttcttctgggacaggatgtccaaattctcccgcaccgccttctcggcgctttcaaagggctgatgggtgcgcagggacatggtgcggctggaatacaccagcgtgtacccggcaatgccggtcttttcgtggtaggcgcggcagaacccgccgtcaatgaccaccagccgtcccccgcccttgatggggctctcgccgtttttctcctgcaccggcacatggccgttgacgatatggctcgtgcccggcaggccgaactctgccagaatacggcggcaggcggcttcatcgttgtaccagctataatagggatctttgacctccgtatgggtggcggggtcggcgatatacagccgctcaaaggtggtcatggcgctgcggccaaacagcggcgaaagcttgccgcaccacagataccacagaaaatcctgtccgctttggcgggcggcactgccctctgccccgtagtagccacggcgggcgcgggcgtcgcagtaatccatcagggcacggccggagtagcggcgtccctcgaagtgctccaccgcaaagccgcccttcgtgttcatgggcacagcgccgtggtagagcagattgccgttttcaatgtggtacacgctgcccttggcatacaaaaattcaatatgctgttgtaatttctcgctctgccggaaggactgcaccagtttttgcagtaccagctgctcgtccgggttcagctttgcggggtctgccgggtctaccgtggggaaggcggtgtcccgcagggggtagctcttctcccctacctgcacggtgtgggcgtcccagtcgatgcggcgcagataatcccgcccctgcatctggaaatccgggttgcggtcgatgacctgacattccagcttgaacatgaggatggagatggccttgtgcatcacggcgcagcggtggagcattccttccgtataggggccgcgggcagcgtccgtgtggggcatccagatggaaagatcgtcctcgccgtagaactgctctgccatgcgctgcaagtgccgcagattgatgccgtagcagtcctccagcatcccgtggttgtggtaggccagcgtggttttaagtacggtgcagatgcagatgggactgccggcggcagcacccatccataccacgtcatggttgccccactggatatctacattgtgatgacgcatcaacagatccagaataatgtccgggcgggggccgcggtcaaacaggtcgcccacgatatgcagtttatccaccgccagatgcttgatgagctcgcacagccgcacgataaagcggtcggcgcggccattctcgatgatgctgcccacgatctggccgtagtacaggtctttatcgtgatcctcaaagtgggcatggagcagctcgtccagaatatagccgcagctggagggcagacagccgcgcacatggtcgcgggtgtgcttggaggacaccagacggcagatatcgatcagctggagaagggtctgggtgtaccactgctccagcgcatcctcggtagtgcagcgcgctttgagctgaggcagcttttcagtgggataatagatcagggtggcaagctcggcacgggctgcctccggcatggtgttgcccagcacggcatccaccttttcccggatgacaccggaggccgagttcaggatgtgcacaaaggcctcgttctcgccgtgcaggtcgctcatgaaatgctccgtgcctttgggcagcttgagcagcgcctgtgtgctgatgatctcgctggcagctgccgcctgcgaggggtaatctctggccagcagggtcagatatttcagattatcgcgaatctcatcggtttcggtgcgcatggtctcctccatcacaacgcattccttgccctgcaaagatgttgcgttttttgtattatcgtttctctgtatttcagtatagcacgaatggcaccaaaagtggtatactgaatacgaaaattttaagcaaaggactttggatattatgccgaaaaccatttccgttcccacctgctgcaccctctgcccccgccgctgcggtgcaaaccgtgccgccgggcgcaccggcttctgcggggcaggcgctacgctaaaagctgcccgcgccgccctgcaccactgggaggagccctgcatcagcggcacaaggggcagcggcacggtgttcttttccggctgcaccctgaagtgctgcttctgccagaactatcccatcagcgccgaggggctgggcaaagagatcaccgtggagcacctggctgagatcttcttgaatttgcaggcgcagggcgcacacaacatcaatctggtcaccccgggtcagtggcagccgtggatcattgccgcgctggacattgcccgcgccaaggggctgcggctgcccatcgtgtgcaacaccggcggctacgagaccgtggaaagcgtgcaggcgtggcgcgggtacatcgacatctggctggctgatttaaaatatgtgtcctctgccctttccgcagagctttccgccgcgccggactattttgcacaggcaaagcccgccatcgaagccatgatggcacaggccgggcatccggtgtttgatgcggacggcatcctgcaaaagggggtcatcctgcggcacctcgcgctgccgggtcatgtggaggacagctttgccgtgctggatcagatggctgcatggaacgacgccgaccccgggtgctttctgcccagcgtcatgagccagtacacccctttctacaaggccgcagagcatggcatcgggcggcgcatcactacctatgaataccgccgggtggtgaactacgccatggacaaagggcttgtgaagggctatatgcagcagaagagcagcgccaaggaggaatacaccccaagctttgacctgactggggtatgatcctgcggcagggcagttttttcggcaactttaccaaattttatggtttattttctcttgcctgcgcgcgcaaacgcttgcattctgtccgggaacgcactataatggatacaacgatgtgttaatagttgcggattcccgcaatgtcatcaggaggagctttatggaacatttcaatccgatccttggcagcgagcccaatggccagaagttcatcacctgtggtgagatcatgctgcgcctgaccccgccgaactacgaaaagatccgcatggcatcggcctttgaggccagttacggcggcagcgaggccaacattgcgctggcgctggcaaaccttggcgtggacagcacctttttcagcgtagtacccaacaacagtctgggcaagagcgctgtgcgctggctgcgctccaacgatgtgcactgcacccccatgatcctgaccgagccggacgagaccccttctaaccgtctgggtacttattatctggagaccggctacggcatccgcgcatccaaggtcatctacgaccgcaagcacagtgccattaccgagtacgatttctctcaggtggatctggacgccttgctggagggctacgactggctgcacctcagcggcattaccccggcactggcacccaactgccgcagcctgatccttgatatgctgaaggtggccaagaagaagggcctgaccgtgagctttgacggcaacttccgctccaccctgtggacttgggaggaagcacgggacttctgtaccgagtgcctgccctatgtggacgtgctgatgggtattgagccctaccacctgtggaaggacgaaaacgaccacagcaagggcgactggaaggacggcgtgcccctgcagcccagctacgagcagcaggacgagatcttccagcggttcatcgagcgctaccccaacctgaagtgcatcgcccgccatgtgcgctacgcccacagcggcagtgaaaacagcctgaaagcctttatgtggtacgagggtcataccttcgagagcaaactgtacacctttaacattctggatcgcgtgggcggcggcgacgcctttgccagcggcctgatctacgccatgctgcacaactacaaagccatggatatgatcaactttgcagttgccagcagcgccatcaagcataccatccacggcgatgccaacatcaccgatgatgtgagcaccatccgcaacctgatgaacatgaactacgatatcaagcggtaagccgcatacagcaacaggctccctgccattggcagggagcctgttttttgcattgcaatcgcgggataaaaaagggcgctccaaaccgtaagcggatggaacgtccttctgttcttgcttagttggacaagatcatgcggtcatttgcaaactcgccgccgctggcgatctggaacttggccagcagatcggagacgtgcagcttctgcttctcctcccctgccacgtcgtagatgatgtgaccctcgtgcatcatgatgaggcggttgccgtatttgatggcatccttcatgttgtgggtgatcatcatggtggtcagatggttctcctccacgatgcgtgccgagagggtgagcaccttcagagccgttttggggtccagtgcagcggtgtgctcatcgagcagcaggagcttcggcttgttcatggtagccatcagcagggtcaacgcctgccgctgaccgccggaaagcagccccacgcgggcagtcagtcgatcctcaaggcccagatcaagggtcttgagcagttcacggtactgctcccgctcggccttggtgatgccgatgcgcagggtgcggcgcttgccgcgccgagctgccagcgccagattttcctcgatctgcatggtggcggcagtgccggtcatggggtcttggaacacgcggccaatgtaagcggcgcgctgatgctcgctcaggcgggtgacgtccacgccgtcaatgaggatcttgccctcgtccaccggccacacaccggcaacggcattcagcatggtggattttcctgcgccgttgccgccgatgacggtgacaaaatcgccctcgttcagcttcaggttcaacccgttcagggcggtcttttggttcaccgtgcctgcattgaaggttttggaaacattttggatctcaagcattttttgcgtcctcctttgcctttttgaccggcttcgagaagtatttgcccttccagtacggcacggcaaggaacactgccaccacggaggcactgagcagcttgagcaggtttgcatcaaagcccagtgtcagcaccagctgaatgacgatataatagatgatcgcgccgatggaaacagaggccagcttgagggcaaagttatggaagatgcggctaaacacagcctcgccaatgatgacggcagccagaccgatgacgatggcaccgcgtcccatgcccacatctgcaaagccctgatactggctgagcagcgcaccggacaaagccaccagcgcattggaaacggccagacccagcacgatgttgaagttggtgttgatgccctgtgcgcgggacatggcagggttagaaccggtagcgcggatgccgcagcccagctccgtaccgaagaaccagtacagcaccccgataacaaccgccgtagcaaggatgaccatgatgatggggttgtgcagggcaaattccttgacccagcgcagggagatgagcaggccgtatttatccacgttgatggactggttggccttgcccatgatcttcaggttgatggaatacagtgctagctgggtcagaataccggccagaatggcgggaatgcccataaaggtgtgcagcaggccggtgacaaggccggtagcaaggccggccagcacagccaccagcaatgctgcccagacgttcatgccggaaagcaggcacatgacgcacaccgcgccgccggtaccgaagctgccgtccacggtcaggtcggctacatccagaatacggtaggtcaggtacacgccaatggccatgataccccagataagcccctgcgcacaggcacccggtaaagcgcccggcaggtttgcaagtcttgcaatgatttccaaaacaatttcctcctaaacgttacacttttttatctcccgctttgatacgggaaagcggagaagagcaagaatccactcttctccgctatttttatattgttccggttttgctgttatcaggcttcgatctctacatagccttccggtacggtcaggccaaggtcatcgcagacagccttattgtacttcttggtcacatcggtgtactcgatgggcatggtggagatatcgctctcgccgttcaggatcttgactgccatctcaccggtggtgtagcccagatcgtagtagctgatggacagggtggccacgccgcagccggagcagataccctcctcaccggcgaatacaggcttcttagccgggcggcagatgccgtccacaatgccggtgttggcggcaacggtgttatcagtgggcacatacagtgcgtcgttctcgtccgcagccttctggcagacggaggacagatcgttggaatccgagaaagcgtactgggtagcagtcacgcccttggcctccagatacttctgtacttcgtctacctgatactggctgtttgcctcggcagagcagtacagcaggccgaccttcttgacctcgggcatccactccacgatcatgtctgcctgctgatccagcggtgccagatcggaggtgccggagacgttgccgcccacggtgccggagaagttatccagacccagtgccacgccgtactcggtaacggaagtgcccagaatggggatggtgttggtagcagcctgtgcagcctgcaaagcaggggtagcatttgccataatcagtgccacgccggaggaaacaaagccgttggcaatggtggcgcaggtagcggaatcaccctgtgcattctggaagtcgaaggtgacgttctcgccaaaggaagcggtcagcgcatcctcaaagccctgcgtagcggcatccagtgcagcgtgctgcaccagctggcagatgccaacggtgaacttttcgccgtttgaagcggcagcgaccgatgcagaagcaaccgtggaggatgctgccgcagaagatgcggaggaagaaccgccgcaggcggaaagggcagctgctgcaccgcaggcaacggcagcagtcaggaaggaacgacgagtgattttacgcatattgatgatctcctctatctccagcccttgcagccaacaggacgccgcactccgggccgatattgtaagcggatcaaacaaggttcgctttacactcgtgaagtataacacagaatcgctggcaaaacaatccacttttgcctgaaaacggccttaattatcgattcaagtaaagtcatctatcaattatttcgaactattatttcgttttttctgatactccgtcagtttgtgcagttccgtgtccagcgtttgcaggtttgcttccagctgcggcagatagtcctgcgcataatcgtagccaaaatacagtgcctgccaaagcttagcctgcatccgatgcaccagcaccgggctgagcactgcctccagctgctccacggtatcttccagtgccatgcaggtctgtgcccagcgcacgtcaatggcttcccgggcgggcacatcgtagcgggcaaggtaatcctgcacctttgcttcgatcacctgcccgccgcagccggtgggctgcaaaaaatagtgcacctcccctgcccggctgatctcctgcgccagcggatacagcgcacacaccagcggctcagcctcatggatggcgcagtggttttcggtcagaaaggggcagttgttgcggttttccttcaccggggcaagccgcagcaccggtaaatggctcaccctgccaatactgctgcggcaataaccccgggctacgatctgcggcggcagacgcagccgggcagcaatacgccacaagtcatacccggacagcacgatatcctcccgcccgcggcagcagttgccgcagcccgcacaggcaaagcggaactgcgtatcccgctccagcagcggcatagcgtcggtacgggtaaaatccacctgtccgcacagatcaatggcttcatctcgcatagtcaaacatccttttccatgatagaatgtccctattgtaccgccggagcacccggtttgcaaggcgagccctgtgaagcgcggttattttttatccgctagtttccggtacacatgcactgcatcgcggatattgtactgctccgtcccgtggtctccgggcgcggcaagcgtaacaaggatgtactcttttccgttcacgatggcaaggctggccagacacagccctgcggcggcggtataccctgttttgccgccttcgatctgtgccccctcgggaagctctgttccgtccagcttgcccagcagtgtgctggtcagcgaaacgccttccgggtgctgtgcagtcgccgtagtggtgtagtgcttggttgtaaaaattgtgcgaaaggtcgtattgtgcagcgctgcctgcaagagctttgccatatctgccgcgctggaatagtgctcggtatcggtcagaccggttgcatttgtaaaatgggtattcttcatgccaagctctgcggccttttggttcatcagcgcggcaaagttttcttcgctgccgcttaccagctgtgccagcgcctcacagcattctgcgccggagggcagcatcgcaccatagagcaggtcacgcaccgtgacagtctcatcgggcacaaagcccgccatagatgctttttcgatctgtaaggctggaaaaatatcctccggcagtgttacctgcttatccagatcgggctctgcctcaatggccagcagtacagtcatcatttttgtcagggaagccggtgcagtacgctcgtcagcacgtttctgcgccagtacccgcccgctttgggcgttcagtaagatcgcgtgtcggctggctgtatccagcagaacgttctgccgcagaaacagcaccagcagtacaagcagtgccgccagaatacatagccgccgactgcggcggtggaatcgtttcatgattagtcgcatcctttttgcaaaattataaagcgctttcaccttgtaacacgagacaaaagcgctttttcctgcaaatttgcggctatgtatttttatgttcatgcaacaaaaaagccccgagactttcatctcagggctttttgttaagtcggcgactacctaataaggtatgtgactccgtcgcactgttatgcacagtgcagcgaagtcgctttttgctttatatgcgagcactcagacgcgaatcttttccatatctccagaaatgtaccgcatacagccccgcacccagaagcaggcaaaagaccgaatagctaagaatcggaagccgcagcagtacaatcttacccgcgatctgggtaaagaaccagcccgttccatataaaatcacgatataaagcaccagccatgcagcatatttcagccaatgctctcgcggcggaaagcctacctgctccatcatccggcggaaaagtacgcaaaacgccgccactgcaacaacaagctgcatcagataccctacggatagttcaaaaacccaatttccaattaccggatagagcagcaagccttccacgccccacccaaaaaagaaatacagcggtgcaacataccagaagtaatctccggctctcagtgttttcaagcttggcttgacctcttccacaaaggtctttgcgtccgaaatcgaatgaaacagttcctgattttccttgttggcttggattgcaatatcaagcaaatcgctgcgcacaagttcgataccacagaagtcccagctgacccggcgaagataacgaatcacttctttaagctgctcctgacttttttcagtcagcaactcggtacgcatccggtttgtttttcgcaatgcaaaatacttattcatctggctcctccttaaaaattttttccaccagctggcagagctggctccaatcctgctgaaactcaagaagcgcccgccgcccttcttccgttacaatgtaatattttcggctcggtcccttgggggaaggtctgcgctccaccgtgacctttccctgttgctccaagcgcaatagcaacggatagagcgtgctctcgctcaagtcagaaaatccgacctgtttcagatgcatcacgatctcatagccataggtcggctcttgagcaatcaatttcaggacacaatattccagaacgccttttaaaagctgtgcattgttttccataagtcctcctctccgctagtatgtaatgcgtagtagcttatctacattgtattacatagtagtgtttctgtcaagtcctgacctattggcattacaaccaaaaatcatgccatatttttatgcaacaaaaaagccctgagactttcatctcagagctctttattaagtcggcgactacctattttcacaagccgtttccagctaacgcgaaaaggaagttccgagcgaggctatcggccagctccgatcctactatgaaaagacctgcccccgtcttgtcccggagattgcaacagagttgatcgtcttggacaaggatgcacagccggcgctggagagctcagcgggctataatcaatttctcatcggagcaccgcactacctgctccttatgtctgccccgcattcctacgcactgatagacgatttataagaaaaccaaagacatcagaataggagatactactatgaattacagcgctatgatccaatatcgcagatccgttcacgcattccgcgaaaaggaagttccgagcgaggctatcggccagctccgatcctactatgaaaagacctgcccccgtcttgtcccggagattgcaacagagttgatcgtcttggacaaggatgcacagccggcgctggagagctcagcgggctataatcaatttctcatcggagcaccgcactacctgctccttatgtctgccccgcattcctacgcagccatcaacgccggctacatgatggaagatcttgtcctcaagctgactgagttggacattgacacctgctggatgaccttcaccgacagcgacaaaatcaaaaaggcactgtctctcgccaccccgttagaggtggcggcaatcgttgcctttggctacggggaaaagaccgcaaaaaagctgcggctgaatatcctaagtatgtctcagatcgatgtgcgggccgagcagcagtactacgcgcccaaaaagggcgtgcacgatttggttcacatggggagctggagcaacaagtctgggcttgacgagatgatggacttctacgacgatatgctctggcagtccttctacgccgcttcgctctcccccagctatctcaaccgtcagccctatgggcagcagcacacccacaggacaaagaaaacttctgcggcatgactatcaagggcatggtgtacgatgacaaaaaggctgcaggcgaacggctgctgctggctcggcaggagatgcccaatgctgatatgatgctgctgggcacctaccgtggctttgaactgaatattcggttcgacagctttaagaatgagcatcaggccgttcttcgggcagagttgagctacccggtatcgctgggcgatgatgcgcgcggcaacatcactcgtctggacaatgccatcgacaactttgctgaccgtattgcagacgccgaaaatgctctgcaaaaccttgaacagcagaaacaggttgcagaggttgaagtggcaaagcccttcgcacaggaggaggaactggccgaaaagtctgcccgccttgctgaattgaacgccttgctgaacatcgaccgtgaccgcagttcctcgcaggatgctcccgaagaaaccgaggaaaccgaaacacctgcaactcgtccgtctgtgctggctgcactgggggaaaagaccaatcagccggaacctgtcaaaccgttccgcagctattatgataaggatggtgatgcacgatgaaagaaaagcgggatgaaaccatcatcctgcgcttgagcaaaacagaaaagaaccgtatctatgaaaaaatgctcagcatgggcatccgcagcctgagcgcgtatatccgcaaaatggcattggatggttattgtctgaaccttgacctgccgcagttgcgccggatgtcgtacctgcttcagaattgcagcaacaatctgaatcaggtggcaaaacgtgccaacgagtgcggcaaagtctacgccgccgacatggaggacctgcggcagcggctggacgagttgattgagatcggtcggcagatcctctcccggctggcagaactctaaatttttccccgcagttggaggactgcgggggtacataaggggtgacatccttgcaaggggtgtggagatgcctttataataaagttgaaagacctgctaataaaagtcaagccctaaaataagaaaattcgccaaccgaccgctgcccatgacaaacagcattcaaatgctcagactgtatttggaggcgtggagggccggcgtcaagaccatttactatgtccgcagcaaggcccttgaggtcgaggcctgcgaaagctgctcgtcataaggaggatagcatgacagaactgaagaaaaagcccctctttaacccggagggcgaccctgatgtgcgcctgcggcgcatgatcggcggcaataccactaacctcaacgacttcaacaatatgaagtacgcttgggtcagcgactggtaccggcaggccatgaacaacttttggatccctggaggagcgcaccgaccgccttgctctggcaaagtgcgcctgacgattcattcacctaaagtggtgcttatcattatgataatcaccactttacttttttaaaggagaaccaccacatgaagaaaaacatttcccgcaaccctttatggccggactggtacaacggtaagaagatcgatgaagtccagtttggccgcgcctttctggaacagtggccgctgaaatgcgtcaacggcgggtcgtactcaacttcaacttcacggacgatgccaagacggtcacccgtgaggaagtgttgggttcgagtgctgtggacggtacagaacgagaaccggaacaagtaaaggcagggtatcactatggtagtggtatcctgccttttgctatttttaacagtgtatggtatactcggcttagcccagtaaattggaagtcatggaggtaacaatacttatgaaaaaatttctttctttgtttttgtgtcttacctgtatactgactttagctgcgtgtggaaaaaagcagcgcccattacgctacctcaagccgataagattacatctattgatataacgattgaagaaaacacagtaagtcattcagataaaacttggatgagtgaaataatcgccgatatttctagttctaaaccgactaagaaggaaagcgttcaagatgtcccgcaagcggaaagttatatcaggattgacttccggcatgagacaggaacaattacgatctttgcgtatgaggacagggggaagtactatcttgaacaaccttatcaaggaatttataaaactgatcgcaaactgttcgaaaggctaaaaggaacggattgatttcaggttgccgtactcgttccctgcagggcttggggctccgcacgcctcaacaagagcatctgccttgcacatgtagtcattttgtgatacaatgaccctgacaggaggtgtcccgtatgatgcagacattcgttcgcccttcccgggatctacgcaaccattacgctgagctttcggagatgctcaaagaccatgaccatgtgatcatcacgaatcatggccgtggagaatccgtactcatcaacattgaggactacgccaagtacgaagagtttttgcaccagcggtatgttgccgaggcacttgccaaggcaacacagcaggcggctgaccccgacacgcagtgggaagaccacgaaagcgtatgggagacgctgagcaagcagtatgacgtataaaattaaatatctgccccttgctgtgcaggatttgaatgagattgcccggtatctgtctggcttttaccctaaaacagccagccgtgtactgaaagaacttcgggagaagatcacaaaattaggcgataccccgaaaatgtgcgaggtctaccgccttgacccggcttatcgtaggttggtcgttgaccagtatctggtgttctatcgcgtcaacgatgaaaacaagattgtggagattcaccgtgtgctgcgaggtgcttggaatctgccgcagtatctggaataaattcaacttcgattgctgtgaacggtacagaaaacccccggcaggcaatcaccattacggtggcagcctgccgggggtattataatgttatcctgtcaaactttttcctgccttacacctcgtgctcggcccagtcctgactgcggcccacggccttgtgccagcccctgaccagcttttcccgctgggcggcgtccattttgggctcgaacagctggttgcagctccacaggtggctgatctcctcccggctcttccacacgccggtggcaaggccggccagatacgccgcgccaagggcggtggtctcccggatggccgggcgcagcacctccttgtccaggatgtcggactggaactgcatcaggaagtggtcgcggctggcaccgccgtccaccttcagggtgctgatggtaatgtcggtgtccttttccatggcccacatcaggtcggcgctctggtaggcaatggattcctcggctgcgcggatgatgtggttctgggtggtgccgcgggtgatgcccagaatggcaccccgggcgtacatatcccagtaaggtgcgcccagaccggtaaaggcgggcacgatgtacacaccgccgttgtccggcaccttctgggcgtagtactcggaatcgcagctgtcctggatcaggtgcatcccgtcccggatccactggatgaccgcgccgcccacaaagacggagccttccagcgcatattctacctcgccgtcaaggctgatggcaatggtggtgaccagaccgttcttgctctggtagatcttgttgccggtgttcatcaacaggaagcagccggtgccgtaggtgtttttcacgtcgccgggcttaaaacagccctgcccgaacagtgcagcctgctggtcgcccgcaataccggccaccggcacgtccacgccctgaatgttggtgtagccgtacacctcgctggagtccttcacgctgggcaggatgcagcgggggatgtccagcgccttgagcagggtgtcgtcccagtccagcgtgcggatattgtacagcatggtgcggctggcgttggtgcggtcggtaacgtgcaccttgccgccggtcagcttccagaccagccaagtgtccaccgtgccgaacaaaagctccccggcctcggccttttcccgtgcaccggggacgttttccaggatccacttgatcttggtggcagagaaataggcgtccggcacaaggccggtgttttcccggatatagtccgccatgccgggggtcttgagcagctcgtccacaaggggcgcggtgcggcggcactgccagacaatggcgttatacaccgggcgtccggtgtttttatcccacaggatggtggtctcgcgctggttggtgatgccaatgcccgcaatgtctctggggtccacgccgctttgggcgatcacctcgttcatcacgccgtactggctggaccagatctccatggggttgtgctccacccagccctgatgggggtagatctgctcaaattcccgctgctgcacgcagacaatgttctgctcgttgtcaaacaggatcgcccggctgctggtagtgccctgatccagtgagaggatatatttggtctggctcatgatcttctctccttgctctgaagcttgagcgcaaaacaaaaaagagcgcaccaaacaaagctatctgctctgtctgtcgctctcctgctctgcgcaaacatattctgtgcttattgtacacgctccgcaggcaaaatacaagcttctgcgcgatttttggacgttctgcacaagggggccgcgctgccgttgaacactctgccgaaagggtgcgcggtgcagccgccggggatgtaaaaagcttgcaaatttgcgaaaaagacgtgacgaaacggcacggatgtggtatcgttaaggggtggattttttgttcggaaaggatttctttgctatgacccggatcgctttctgtgatgacgatgccgcgctgctgcatcagatgcaggattttctggagcagtaccgcaccctgcggtgggtgcagctggagctggccccctatacaaagcccgtggagcttctggcagatatcgaggccggggtgcgctttgatgtgctgtttttggatgtgctcatgcccggcatcaacggcatcaacgccgcgcgggagatccgccggtacgacacggcggtgcagatcatctttgtgacctcttcttcggaatttgccgtacagtcctatgtggtaggcgcatactactaccagctcaagcccatctggaaggacagctttttccgccttaccgatgctgtgctggccgagtgccgcaaacgcacccagcacagcctgatcctgcgctgcaaaagcggcgtgacccgcattacgctggacagtctggaatactgcgaggtgcaggggcgcacgctgggtggcgctggcggtggcactgttcctcccgcagcatccgctggtgcagccggtggcagagctgctgttcaccctgccgctgctgctgttgttcatccgcttcgttgcaccctccatgcggcagctttcccactacccggcctcggtgcagtgccagttcggcatcgtgccgctggtgggctatctttttgactacatcacccatgtctacaccagccttttgtccgaggcgaacccggcggcggtggagttcatgttctttgtgtgctgcgcagcctttctgtgctccattttgcgcgcctcccgtgtggagcggcagcgcatccagatggagcagttacagaccagcctgaacctgcaagtcacgcaggccatgcgcgagatcgaagcgctgcgcctttcccagcagcgcgccagcacctaccgcaccggccacgggcttggagtgcgcagcatctgcgccatctcagagcagtacggcggcctgaccagctttgccgccaaggatgggcagtttaccctgcgggtaatgttataataaaaagggactcgaaaacgcctgcggcgtttccaagtcccttttttatagaaagatgttataattgctgctttgccagcacgtcagaggtaggggtctggaacaccgggatgtcggcataggggtcggcagcggtgtcggcgggcaggctcttcatatattcgtccatggcgacggccaccttcttggcaacagccacagcctctaccacggtgcgtgcgcccatgacggcgtcgccgccggcaaatacgccctcgcgggtggtgcagccgtcctcgctgacgctcagcagacccttctggttggtctcgatgccggtcgtggtcttgacgaggttgctctcagaaccctgactgaccgacacgatgacgccggtgtgggggtaaaaagtctcgctgccctctacctgcgtaaacttgccgtcctcgcccttgacggtgtcgcggcagatcaggccgttttcccggatctccaccggtgccttgcagaaacggaagcccacgccttccagcttggcgtagctcacctcgtactcggaggcgctgatgcagctttcgtcccggcgggcgtagcaggtaacgtggcgggcaccgttgcggatggcggtgcgggcgcagtccatggcagagttgcccacgccgatgacggccacatcatcgcccagacggaaagccttggagtttgccagatagtcgatgccgaaagccacgttgccaaggctctcgcccttgatgtgcatggcgttggccttccacagaccggcgccgatgaacacgctcttgtagccgtcgcggaacagatcgtcgatggtgatggtcttgccgatggtggtattggggcgcaccttgatgcccttcagttccagatgacggtactggaaatcgtccagcacactgtccggcaggcggtagttggggatgccgtaacgcatcacgccgccgatcttatcccgggcgtcaaagatggtcacatcgtagccccagcgtgccagcagcactgcgatggtcaggcctgccgggccggagcccaccacagcggccttcatgccgtttttcggggcagggcctgcggtcattttgttggcgtaggtggtggagatatagtcctcgatgatggaaaagtgcaccgggtcgtggctgggcatccggttgcggatgcagtggccctcgcactgcttttcgtggttgcacaccagactgcatacagtggtcagggggttgttttcaaacagcatccggccagcatcgtccatctggtttgccttgagcagacggatgacttccgggatattggtgtggatggggcagccctcctgacacatcggctttttgcagccgaggcagcggttggcttcgtccagaacatgaagtgccatgggttcctccttgtgtttcccctgcgggaacagtcgttttttacagactcgttgtatccaacattgcattgctttaatcatacacccgaactgcgccggatacaagagggcacaatataaaatttttggcgttatttttttgtcaattcgtcaaaaagataattttttgacgatatatcccgcccatcggctccggtttaacccggcacagtgcaccaaggtcgctggctctgctctgggcggcagccatttgggcgcaggtctcgttttcccgtgtcagccgcgccagcgagtgggacagcggcagcgccgtttccccgggcaggggcagagcctccttgcgtgcgccaagcaggtgcaggtagggtggcagtgccggggtctgggcggtgtagcccagcgccgcatccatcgccagccgccgcatccgtgcacgggggtagcgcacggtggtcagggcgtccagcagagtgggcaggcttgcggtctcccgcacggcgttttccagccggtgctccaagccctcggataccccacgcactgttgcaaagggggcttgccccgcgcaggctgcccgcagcagcgccagctcgcagtgccccatgactgcaaaatctgtatactttccgtcatattctgcctgtttatacagcttcagcgccttttccggcacataaggtgccagtgccgccgcgccgccctccgcccagagtgcccgcagggcactggcgctggcaaaggctgcatgagcactttcggtcagcgcctgcccgtggtctgcgccctgccgcggcagagcgatgggctgcatttctacattttgttctataatagccttacaatactctacggcgagattgttgttgggcttgtccagcagtgcggcaacgtctgaccccgggcacagcgcctgcaccgccgcctgccgggcggcggcaaagctgcgcgccccggcggccagctgctgtctgagcgcggcacggtagtcctcgctgcacagcacccgggcggctttttgcagcagggcggtgtccggggtctctgccccaaagaccagtgcgtcgcacccggcagcggccagaatgcgcacccccgcccgggcaaaagcctcggcaccggcgcaggcgcagggcgcgggcagggcaaacacaaggtctgctccgcaggccagcgccgcctgcacccgcaccgcctccggtagcagcggcagcgcgccccgctgggtaagcccgcagctcatggctacggccacccgctgtgcccccagtgcccgcgcctgcgccagctgccatgcgtggccgttgtggaaggggtcgtactccgcaatgatgcctgcaaacttcatggaactgctccttttcgccaaaagattgttaaatttatatcgcatatacagaaaaatcctgccgtttccgggatttgtgggcaggatgtacaaaaaccttgtacacaagttttaccgctttgcccgggttgcgccttgaaaagccgccacgcctattatataataaacataggaatctgtaaaattctgtccgcaggtttttaggctgcggacggtacaaaaattttcaggaggcaacacagatgaagattctggttattaactgcggttcttcttccctgaagtatcagctgatcgatatggacggcgaaaaggtgctgtgcaagggcctgtgcgagcgcattggcatggagagcagcatgatcactcacgaggccaacggcaccaaggctaccaccccggcgatcttccccacccacaccgaggcttttgccgaggtcgtgaagaagatgaccaccggcgcaggcaagtgcatcaatgacgtgagcgagatcgacgccatcggtcaccgcgtcgtgcatggcggcgagaagttcaagagcagctgcttgatcaccgatgaggtcatcaacactctgcgtgagctgagcccgctggctcccctgcacaaccccgccggtattctgggtatcgaggccgcccgcaaggtgttcggcaacattcccatggtggctgtgttcgacaccgccttccacagcaccatgccgccgaaggcttatatgtacgccatcccctacgagtactatgagaagtacggcgtgcgccgctacggcttccacggcaccagccacaagtacgttgcccacaaggcagccgagtatctggaggagcccattgagcgcctgaagctgatcacctgccatctgggcaacggttcttccattgccgcagtcgatcagggcaaggtcgtggatacctccatgggcatgaccccgctggccggcctgatgatgggcacccgctgcggcgatctggacccctctgtggtcaactacctgaagtacactctgaacatcaccggccacgagctggacgagatcctgaacaagaagtccggtctgctgggcatctccggtgtttccagcgataagcgcgacgtggaagaggctgccgcggccggcaacaagcgcgcacagctggcttccgatatgctgaactaccagatcaaaaagaccatcggcagctacattgcagctatgggcggcgtggatgccatcgtctttaccggcggcatcggcgagcacgatgccattgcccgtgcaaagatctgccaccacatggattggctgggcatccgcatcgacaccgagaagaacaagcaccctgttggcgatgtgtgcgagatcaccgcttggggcgcaaaggtgcgcacgctggtcattgctaccgacgaggagctgatgatcgcccgcgacactaaggaagtcatcgagaagtaagcttttcccaaagggctttgcaggggctgctgcacagagtgtgcggcagccccttttgtttgtgtcaaaatgcgtttgtcgcggccgcaggccgcgacaaacgcgaaatataataaattttcctctatttatggccagagtacaagcggaggccatttccaatcgtctgcgtccaaaagcggcgcgccgcttttccatcttaaggcggtgattttacccaaatatatgctgtcggtttgtgccatgtgtacaaataaaagggcgaacggttgttttttggttgacaaatctcaaaaataacggtacaataggaaagtcctcaatccgagggcgtttatctattcaagcccctggtaagcttactgatcagcgcgatggtcccaaaaccaaaggtatggttacaatccttccgtgggcaagaactaactaaagaggagatactactatgtttgaagacaagactctggtctgcaaggactgcggtaaggaatttgtttggactgccggtgagcaggagttctacgcttctcgcggcttcgagaaccagccccagcgctgcaagccctgccgtgacgcccgcaagaacggcggcgcacgcagcaacagcggcgagcgtcagatgttcgacgctgtctgcgcagcttgcggcaaggcctgcaaggttcccttccagccccgtgaggaccgtccggtctactgctctgactgcttcgctcgcatgaagcagaactaagcgctgattttcatttaaatcggtaacaaatccccccgctgccagtcggcagcggggggatttttgcgtttctcttcaggtattcttacgctgatttgcgcccgagagcagcagcaccgcgcggcatagccgcagcttgagcagcaacagctttacctggtcgttccggctctgcatggcgtgcagtggggtgctgcgcaccgccgtgcgcacccggggcttttgcagggtactgcgcagccaagcagtctgctcggaaagggaaagcgggctgcatccaagattcttgattcccatcatcaggtcgcggatcgtgcagtagctcgcctttgcgcggtgcatggggctgtcctgtaagccccacgcggcaacggtgtcccacactgcatcgctgagataaaagttatcctccagacgctccgggtggtagctgttggacagactgccccgccgggcagcggtgtagtggtacagcggcttttccagcaccaccagacagccgggattttgacgataaaaggctacaaagaacagcccgtcctcccccagctgatggcaggagaaacgcagccgatgctgctccagaaacgcccggcggaacagcttattggtgaccagatacgaggacgccgtctcgtcgaaatgttccttgaagggcgcgccccggtacacgccggagagggtgctgccgctggtctgcgtgtgcagcagccggtcgttttcatcatagctgtccagatacagcccaaactccacgcagtccgcatcagcattccgggcggcatgatacagcacttctgccgcatccggctctacccagtcatccgggtccagaaagaagatatactcgccccgggctgcatccagacccgcgttgcgggcagtggctacgccgccgttgggctggtcgatgaagcgaaagcgcgcatcctcggcaacagcctgtgcacacagcgcggcgctgccgtccttagagccatcgttgatgagaatggcctcgaagtcggtcaaagtctgcgcccgcagtgagcgcagcgcccggggcagcaggcgctccatattataaacaggcactataaacgagatacagggcattgttttcactccttgccgtcacacttccttcatcagaatatggatgcggtcccgcatctcctgccgactgtccggcatccacaccttgggttccgggggctttttgcgctccatggcgtaggcaagcgtcaccagacgcagcgccatcgtgctccagaaataaaaggcggtattatcggtcaggtaggtcaccgtcatatagcctagctcggacagatacagcaacgtggtctcttggtctgcatagcgctgccagaacagcggagtcagaacatactggatgctggaccagagcagaaaaccaggaaagcctacctctacaaagaccttcaggatgtcgttgtggaaggggtaaggctggttgatgagtccgtcattataccactgggcgatgatggtgtccacatattcaaaaccgcggccgatataggtgatagaaaattcatagtaggggttcgccatgctccacagatagtcccgtcccatcatgtcaatgccaaaactgttcagcaaccttgaaataacaccgtagcgcacacagtagaggaatgccagaaaaaacaggatgcagcagacgcccactgccgggtaaaaccagccggggactttgcgcttgcggagaagcagagcaatcaggacgaacagaaccaccgccgggatggcgatgcgcttcatgccgaccagaaaaaaccagcagcagagcagcagatacagccagcgcttgcgcttttcctgccgggtagtacgaggagcaaaaacggcgtagtacaagatcatctgcccgaacacaaaggtcaggtcgtgaatctccagctgcagcgcatagccatccgcatcaccgaaggtgatcagacaggtaacgagagactggatgctggctgcaaaaccgtagccaggaatgctcagtagcatgatggccgtgttggcaatgcagatgctgatggtaaacagctcgatggctttttcccggaacagatagaccagcgccacggcagtgaggatggcaatactctggaacacgatcttggagcagcttcggatcatggaagacactgcggcaaagctttcgatccagatgaccatcgaccagaaaaacagcgccgccatcagggacatataaagcagggtaggcttccataactcccggagacgcttttcgtccgggtaaaacagggtgtacagcattgccagcccgatcacccccagagagatggctttgggaaggccgcccactgcgctgttgattggtttccactctcccagcccggcaccggccaaaaagaccacgcaaccgatggtcagcagtttttgccacagcgggctgtccttataaaacaaagaggccggagttttccggctgtaatcctttttggtcaggatctgatccaatgtgcgcatgaaaagggctctccttttattgtgggtgttcccgcagccgccggggggttacgcctgccctcccagttgcaggtactgctgctgtaagcgggcggcggcgatgttgatatcgtagcccgcctgccggatcagttctgcaccggcagagcggtcacagggctggtggagcatccgctgcaagcctgctgcccagtctgcattgctggcggaaagcgggatctggatggcatgggaagaaagcagcacctccgccggcactgcgtccgaaaatacgcaccccagcccagcggcttgcgcctcgatccccaccaccggcagaccctcaaagcgggagggcatgacgaagagatccatcatctggtaccagtcggccacattgctttgcaacccggcaaacaggatatggtctgtgatgcccagttcctgcgcctgtgcacggacagcctgctccagcctgccggtaccgatgagcaccagcatcgcccggggttccagctgcaaaaaggcggcaaagatctccaatagacgctcgtggttcttgcggacatcaaagcggcctacatgacccagcaccacccggtcctccagcccgtagcgcgcccgcatttcggcgcggacggcgggggagaagcggaaggtctccggctcgatggcgttgggaatgatctgtccccggcgctcccagtccgctttgccaaagtagtagatgcccgcatcccggccgcaggcccacaggtgggtggcggcgccgggcagcagctgcttacagaacatcttcagcggccacttgtagtcccggacgatccagatattatgggcgtgggcaatgcgcacttgcagcccggccttctctgcacccttcagggcataaagccccatcgcctcgttgtgggcgtgcaggatgcggatgcgggggtctgcggccacggtctgctgcacaaagcgcagatacgccgggtagtgcagcgggtttaatcccggactctggtagatgtgcccgcccagacggcggatctcgtcgtcgtaatcgccgggcttttgcttgttgacgataaaatcaaactggaccttttcgcggtcgatatgccggtagtagttcatcagcatggtctcgatcccgccgcggtccatattgctgaccgaatgcagcactcgtatcatgggtactccttacattataacaactgaaatcttctgccgtagcggcaccacagcccaaagtcctgctgccgcagcgcccgggcaccccagcgggcacggcggggcagtgcgcccgcttgcggcagcgcctttgcgtacaaagcacagcacagccggaaaacagcctgctgcgtttccggcggcaggccggatacagtggcatagcagaaagccgaaagctgcagcgtcagggtgcagcggtacagcgcatcgtggggcaggcccagcgcagcatcctgcactgccagctgctccatgatccagtagctctgcacggcggcagggcggtgctggcttgtggcggtaagccccttggggtttttgcgccacagatagaccacctcgggcacagaggccacgctctttgccagccggaataccagaaaatggatgatggcatcctcaaagcaggtatagtaagccggaaagcgcacctgtgcaaacagttcccgccggtacaccttgccccatggcatcccgggcagctcgaaccgctctggcgcggcggcaccggtgtagactgccgccgggtagcgctgcatcgagccatgggtgccgtcggtgtacaggtactgccagccaccctgcaccacatcggcgtcaaggcgctgtgcggcctccagcagggtgcggatggcaccaggcaataacagatcgtcgctgtccacgaacatcagccagcggcccacggcgtggcgcagtccctcgttgcgggcggcggcggcgctgcggggcgcactgcaattgcacagcaacaccccgggcagtgcccggtagcgttccagcacggcggctgtgccgtcggtggaatcgctgtccaccacgatcagctgcacggtgcaactggtctcctgctgcaaaatgctgtccagacaggggccgatggtagcttcgccgttgtacaccggcacaatgaccgaaagggtcaccgccgggtcctgctgcggcagcagcgggcaggtctcttctgctgcaggtttcgggcacagggctgccagcgcggcgcggtcggcctgtgtgctgtccggcagcggggcaccgccccggtgcagcagatggtacagcccaaggtctgcatggccgcaggctgcgccgcacacggcggcagcgcccgccagcagacggctgcgggtgtggcagtggatcagctggtaagcgcgtcggttctggatcatgcttcaccacgctccattccggcaaggacagcgccgccctcctctgcgatcagggacatctttttctgtgcgcagcgcacaaggtcgcgcacatggtagagctcctcctccgaggtggtggcccatgcggcggtgaacaggatggggtactccgggttgagcttattgtactcgtccacctgactttgcagaatgcggatcatgacctctgccttccgggtgctgcattcatcaaagaaggcaaggaacttgcccgcgccgttgtagcccaccgtaccgtcggtatcgcccatcagctgcaaaagaccggaaaaatccttcaggatgccgtcacccacatggtagccgaagcggcggctcatctcggtcaggttgtccagctgcaaagcaaagcaggtatagtcctccggcagaatgcggtcggccatgccggagatatacacgttgagcttttcgcggttgggcagaccggtctttttgtccacatacagcagataatccaccgcatccgagatgcggcccagcagaattgcgccgcagcagccgatgacaaagaacagcaccagcgcaagcatcaggtacagcttgacattgatggcggcagccacctgcaccgagctgatcatcttcagataatccgcgctgatgtacaggttcagctccttgctgctggtattgatgatctcgtagtagcttttcagctgcgcctcgtagtcgttgatcatgctttccatcttggcgtgctgctcgcctgtaccgccaaaatccacgttgcggaagctttgcaggatctcctcctgaaactgccggtcgatctggctggatgcgacctgctgttccagcgataccagtttcagcaccagaccgtcgtaggtggtctgtgccttatcgccagcaccttccagctcgatgttattcaggatatagtccgaggacaccacctcgccccggtcagtaaagtagttttgcagcagatcggcgttcttgtacacatactggtcggtcaggctccacagactgtcccgctgctcggtggtgatctgttcgttctgctttgcagtttcgatggtgttggccagatattcctgcagcaccgtgccgtcccgcacctgcgggccgttgagcacataggcgtacagcgccgggatggtgtattttttgaagtcggaatagatatcgcacaggtctgcataggtgtagccggtgcgggaggagcgaaaattcgggtagtgctcccgcttgctcagcagatagtcctgcatctcgttggtatcgttttccagaatgcggatgcactcgtagtaatcgtagccattgtccagcagaccggacgaggggttgagcgagagtttctgctccacatatttttccgtataataggtgcagtagctctggatgatggcatccagcatattgcgggcataacccgcgccctgctctccatccaccacaaggctcaccttgtaggtatccgggaaataggtcacctcttcgcccttttgcagcagtgcctcgttgatggtctgctgatcttccgagattaccggggtcaccgagatgttggaacggatggtgctcagccgcccggaagcacccagtgcatccatggcctgcgagatgacggtggaggagtaaatctcgttgacgtccagctcgctgccgtccggggtgtagccgtccgagatgccgtcgttggtatagcggataatgaccgatgcagtgtacttctgcctaccgtctgcatacaggtagatggcggccgcacctgccagcgacaccagaaagatcagcaggctgaaacgcttcaggtagcgcaggatctcaaactttttcatctgcggtgccttgcctttctgcgtttacgttcgtggagcagccatgcgctgcccagcatcacggcaacggactccatcagggtctttttcaggctcaggcgctgcaggaaggaggccgagccgtaggtaaaggtaatatagttctgggatttgtacttgatatacgccttgtccagtacaaacagctgctccgagatctcgttgatggcggtctccagcttgttcaccatggcctgcgcctcggccagacgcggctggccggcatccagctcccggatcttctggatcacataattcgtgctcacgatctcggactggtagtcggtggcatcggccagagaagcgtctgccgcccgcgccagcgcatccatggcggtcttggtgcgggacatatagtactcgcttgattcatccacggtggggatcatcatgatggaggtcatggatttttcgtagatggaaatgccctttttgtccgcgtcatagtaagcctgctgggtgcgcatgtcaatatcgtcgatcttgttcttgtattccagaatgctggtcagcatggccgggtcgcgggcaacgccgccctcaatgacaaaggccatggcgttgggcaggtcgtaatccaccagattgttgatcattttgcccagtgtagtaaagttgttggtggaagggtcggggtttgtatcgtccgtaaagcttttgttttcccccagacgggcgttcagatagcggttcagcgcggcggcgcgcacctccagctcgttcagtcgcaggtaaggctcgcacgcggtggtcacttccagcttttccttgaggatgctctggttatcgcagtagttgctcagaaagatctcccggtaggattcgcacacgctctgcaaaagatctgtgggcttgcggttgcccaggttcagcttgcgggtgttgatggagagatagtagttggtgctgatatactcgctgccgttggcgctgccggtgccgtccgggctcagggaaaggcactgggccagctgggaggcagtcaggctgtcctgcaagcccacccgccggatggcgcgctccatcacctcgtccgacacgatctcgtaggcgttgaagcgggtcttgttggggttcatgccaagcgccgcctcggagtaattgaaggagatgctggcagtggcgctgtccgcacttttgaaatagtgaaccagcccgaacagacagcacaaggtcagcaggcagagaaacaggcggtatttatttgtccagatatgacgcagcgcctgtttgattttttctttgatgtcatccatggcattctacccttttgcagcggcctgcacgcgcagcgcaggctgcttagtcgatgtcaatgaccgaaagttccggcacattgttgatgcggggcgcccggctggaatcgcccagtccccggcttacaatgagggtggcgttgttggcaagtgtataactgcccccggcatagtcgggcagaaagccctcctcggcggtataaagcggaccgatcttcggcagacgcacgatgccgccgtgggtgtgcccggcaagacccagctcaaaggaataattttccagatgctcgggaaagtaggtgggaacgtgtgccagacagatgcgcaggtcgtagtctgtctgcggctccacgctgtccataaaggtgctggcaccgtagttagaaaaatccgccgggctgccctccacgcccagaatgctgataacgttgtcgtggatggtatagcgcgcctcctgattgcgcaggacggtcaccccggcggcggtgaacttttccaccagttcccggtcgttgtccagaaaatacagctcgtcctcgtggttgcccagcactccgcataccggggcaatctcgctcagctgacggaacagggagagcatattatcataatcggtgccttcgccgtaggtcacaaagtcgccgcccagcaggatcagatccggggcaaggctgcggacatcctgcaccagctcacagttatctgctccgtactcccgcagatgcagatcggtcagaaaaacgacccggcagctctgggtcagcttgcgggaatggatctgatagaactctgccgtatagtggatgcggttatagcagatattctgccacagcgccccgcccagcagggcgagcagggcaacaagaaccagcagcgtcagcagcacctgcttccaggggggcgttgccctctgtgcgcagctgccgctgtgtgtgtgtctgccgctttgtgctgcgccttttccgtgttttgctttgataaaggccacatcctttctgccggggaacgttgcatagagaagggcgcagcacaaggccgcagcccatctttccaaaaacggatacaaaaactgatatataaataaattataacatatttagtaggaaaagcaaagagtgcgtctctgccatgggcggatttcacatttgggagttcccatcaaaaaagggatgccgcgcacgcagcatcccttttgcatatttgcagatcaatcgtcgtcgctgtccagcttgagcacggcggtaaaggcctcgctgggcagggaaacgctgcccagctgacgcatcttctttttgccttccttctgcttttccagcagcttctttttacgggagatatcaccgccgtagcacttggccagcacgtccttgcgcatggccttgaccgtctcgcgggcaatgatcttgccgccgatggctgcctgcaccgggatctcgaacaggttgcgcgggatgttgtcccgcagcttttcgcagatgcggcgtcccttggcgtaggcgttgtcccggaacacgatcatggacaaggcgtccacggggtcgccgttgagcaaaaagtccagcttgaccagatcgctctcacggtactccttgaactcatagtcgtagctggcgtagccccggctgcggctcttgatggcatcaaagaagtcgtacacgatctcgcccagcggcagcgcgtagtgcaggtccacccgcacatcgtccagatacttcatgtcgatcagcacgccgcgcttgctctggcacagatccatcaggccgcccacatagtcgttgggggtgtacagatgcacatccacaaagggctcctcctgcttgacgatgttgctggggtccgggtagctggaggggttgtcgatcatttccactgtgccgtcggtcaaggtcaggcggtagcgcacgctgggggtggtggtgatgatgtccagatcaaactcccgctccaggcgctcggtgatgatctccatatgcagcagacccaggaaaccgcagcggaagccgaagcccagcgcggcgctggtctccagctcaaaggtcagggaggcatcgttcagctgcaatttttccagcgcgtccttcaggtcagggtacttggcaccatcggcagggtagatgccgcagaacaccatgggtttgacctgacggtagccgggcagcgcttctgcggtggggcgctctgccagtgtaacggtatcgcccacgcgggtgtcctgcaccgtcttgatgctggcggtcaggtagcctacctcaccggcctgcagctgggcacagggggtcagggaggtggcacccatgtgccccacctccaccagcgtgaactctgcgccggtagccatcatgcggatggtgtcgccgggcttcaccgagccctcgaacacgcggatgtagacgatgacgcccttgtagctgtcgtagatgctgtcgaagatcagcgcctttaagggggcatccgggtcgccggtgggggcggggatatcactgaccacacgctccagcacctgatcgacgttcaggccagtcttggcggagacgcggggcgcgtccatgcagggcaggccgatcacgtcctccacctcctgcgccacctcgtccgggtgggcgctgggcagatcgatcttgttcaggatgggcaccagctccagatcgtgctccagtgccatataggtgtttgccagcgtctgcgcctccacgccctgcgtggcgtccaccaccagaatggcgccctcgcaggcggccagactgcggctgacctcgtaggcaaagtccacatgacccggggtgtcgatcaggttgaactcgtaggtcttgccgtcctttgcagtatagttcatggtcacggcacgcgccttgatggtaatgccgcgctcgcgctcgatatccatgttgtcaaggatctggtcctccatggtgcgctcgtccacgctcttggtcagctccagaatgcggtcggacagggtggatttgccgtggtcgatatgtgcaatgatgcagaagttgcggatgttgtctcttgccatgtagttcctccgggcagctttatgcttctaagatccagtcctccacggccacgatctgtccgtggtcgcggtagacacggggcacgcggcgggaaacgccgcacagcacttcgtaggggatggtatcggtcttgcgggcaatggtctctgcggtgtcgctcacggtgccgccccacaggatggcttcatcgtcctcgcgcacttccggtacatcggtcacgtccaccatcatctgatccatacacacccgccccagtaccgggcaggccttgccgtggatctccaccacgcctttgccgcagctcaaaagccgggggtagccgtcggcatagccggtgcaaagggtggctaccttagtgggcttttcggcggtgaagcggcggccgtagctggcgcactggccgggctgcatctccttgatcatgctcaccacggtcttaagggtcattaccggcttaaagcgtccaaagcgcacctcgtcgctggggtcgtagccgtacaggatgatgccggggcgcgccatgcagcgctcccggggcaagccctccggccagtccgggtgcagcatgaccccggcagagttgtcacagtgcacaagggcaggctcccgcccggcggccttcagtgcgtggaaggctttcacgaacagtgcgtgctgctcggcagtataggccacattctccggggcggtatcatcggccacggaaaaatgctggaacaggccggtcatttccagcccgggcagcgcacaggcttccagcatctcccggatggcggcgtcaaaatcggtgcgcagggcaaagccgatgcgccccatgccggtgtcggccttgaggtggatgtgtaccctgccgcctgccgccacggcggcttcgctcagggcgtgtgcctgcgcaagggagtagcaggccacggtgatgtcgttctggatcagagcggcggcgtaggcgggctgcacatgacccagaatgaggatgggcaaagtctgccctgccttgcgcagctgcacagcctcggtcaggcagctgaccgccagccatgcggcgccctcctcggcgaacacccgggcgcactgtaccgcgccgtggccgtagctgtccgccttgaccactgcgcacaggggcagcgcccctgcccgggcctttacctcccggaaattataccgaagggcctcgaggtcgatctcagcccagacgtgtttttcaaacggttgtttctgcatgatctgtttccttttttggtacgataaagctgccccggcccgtgtggacgggacgccagccgtcaatgccgctctcctgcaaggcatggagagtcttttggcggaaggcgtggtcggtacggcagcgctcctgcacaaattccttggtctgttcccgcacggtaacaccgtcggcggggcagcggcttttcacgatgggcaagtccgcctcccgcacggcgcactgcacctcgtactcggtggcaagcagcatgggacggatgagggtgagatcccgctgggagaggtaggtcaccggcgagaagcagccgatgcgtccctcccgccagaggttcatataaaaggtctccacggcatcgtccagatgatgccccagcgccaccttgttgcagcccagctcctgcgcggcggtgtgcagcgcgccccgccgcagcttggcacacagggcgcaggggttcttctccttgcggtactcgaacaccaccgggccgatctcggtgtggcgcacctcgtaggggatgccgtgctgccggaacagctctgccagcgccgagtagtccatgggctgatggtcgaactgcgggtccagcgtgaccgccaccacctcgtaatcgaagccgatgtacttgcgcagcatggaaagaccgatggtcagcgccacgctgtccttgccgccggaaacgcccaccatcacccggtcgccgggggcaatcatttcatagtcctgtacggccttgcgcattaaaccgcaaagccgctgcattgcacgaaggtcgctcatgacaggctcacgctttctaccagattgaccacatcgctgatggacgccagctttgtcagcgccgagacatagaccacatcgccgctgtcataggtaatggtggccagcacggcgtagtaggtgcggatatcacagcgcaccgcttccactgctgcgccctccacggtcaggttgaccttgcggggcttgatgacgccgtaggcctgcttgaggtcggcttccgagtcctcgataaagttttcgtagctgtcggcggtgccccgctgtaacaaaacggcctgatagtcctcactgtctgccgtgtcggcggtggcaagctccagcacggtgccgagggttgcgtcctcggtcatgcggcacacgctccacacgctgctgtcgtagtagacagagacgccgttcgtgccggtatagtgggtgtcaggcgtcgcgggggtctgccggttcaccagcagggtgagcaccatgtaggctgcgatgcccagacagatgaaaatggccatcgccgtcagcagcttggagctgcgacgctgcgccgaagaagtgcggtcgatctcatttggcatggatgtattctccttgtgttggcaagggcagcggtgcaccgcccatatcctttatagtataccacaaccgcagcgggatttgtagcgggcaaatggcaaaaatatgccggggcgggcaaaaaacttttgcaaaaatcgaaattcagaaatcaagaggatttgagagaaaacgagcgattttgagagtttcaaaaatttccgccgaaaaaatccaaaaatcatgttgacaggcgcgtttttgtgttgtatactgacactcgcgccccaaaagggcgcctgaaacgtacaaaaagcttatcaggaggaaatagatatgagcactactctcgtaaagcccgctgaagtcgagcgtaagtggtacctgctcgacgctaccggcaagagcctgggccacgtcgctgctgaggccgctgttctgctgcgcggcaagcagaaggtcgattacacccccaacgtggactgcggcgatttcgtggttgtcatcaactgcgacaaggctgttctgaccggcaagaaggccgagcagaagttccacatcacccacagcaagtacatcggcggcctgaagaaggtccagtacagcaagctgatggctgagaacagcgatctggctatgacctacgctatcaagggcatgatcccttccaacaccatcggtgataaggctctgacccgcctgcactgctaccagggtgccgagcacgctcacgctgctcagaagcccgagaagatcgagttctaagaaggaggcaatcgaatatgtacgaaaccaaaccttatttctacggcactggtcgtcgtaaggattccgttgcccgcgttcgcgtttacaccggcaccggtaagatcaccatcaacgatcgtgatatcgacaactacttcggtctggagaccctgaagctgatcgtccgttctccgctggtcctgctgggcctggagggcaagtatgacgtcgtcgtccgcgtttccggcggcggtgtttccggtcaggctggcgctatccgtcacggcctgagccgcgccctgctgcagcagagcgatgagaaccgtcctgtgctgaagaaggctggcttcctgacccgcgatcctcgtatgaaggagcgtaagaagtacggtctgaaggctgcacgtcgtgctccccagttctccaagcgctgattatatttcagatgcaactttacggctctgcttcggcagagccgttttttgttgcccctttcccggagaactggggagcacgactgcgcatctccggcggttgccccgcaaggggcgagccggaggcgcttacaaaactttgctcaagcatcgcgtgcagggcgcagccctgccagcgatgctccccagttctccaagcgctgatttatctcagtgtgcatttttacggctctgcttcggcagagccgtttttttgctgcccactttcccggagaacaggggagcacgactgcgcatctccggcggttgccccgcaaggggcgagccggaggcgcttattgatctttgctcaagcatcgcgtgcagggcgcagccctgccagcgatgctccccagttctccaagcgctgattatatttcagacgcaactttacggctctgcttcggcagagccgttttttgttgcccctttcccggagaactggggagcacgactgcgcatctctggcggttgccccgtgaggggcgagccggaggcgctcaaaatctttgctcaagcatcgcgtgctaaaacaaaaagcatgggtttgcgtctattctgcaaactttttatgaaccctattgacaaagtgggtgaataggagtatatttttagcagtcgagcagatagagtgctaaaagtaaaacaaactgctccgtaggaggcgtgcaagaccatgaagaagaacatcgatacaattcaatcacggctctgccgccgccgggcgtggagctgttagcaaagaacttatccgtccgctaaaataaaccttccggtatgaatggaggcttgactttatgaataccaatcaatatacccaaaagacccttgaggctttgcaggcagcccagcagctggctgtggagtatcagcacaatgcgctggagcccgcccacctgctacacgcactggctgcgcaggaaaacggcctgatccctcagctgctgcaaaagctgaatgttgaccccggcagctttgccgccgccgtggcagaaaagctgtccgcactgccccgggtgtccggttccggccgtgaccctgataaggtctatatctcgcaggcaaccgataaggtgctcagcgccgccgcccgcgaagccaaggccatgaaggacgacttcatcagcgtggagcatctgttccttggcctgctggacgagcaggaccagactaccagcgagctgttccgcgccttcaacctgaaaaaggacgcctttttgcagcagcttaccgccgtgcgcggcaaccagcgggtgaccaccgataacccggaggacacctacaacgcactgcagaagtacggtcaggatctggtggaacttgcccgcaagcagaaactggaccccgtcattggtcgagatcaggagatccgcaatgtgatccgtatcctgtcccgtaagaccaaaaacaacccctgcctcatcggtgagcccggcgttggtaaaaccgccatcgccgagggtctggcgcagcgcatcgtgcgtggcgatgtgcccgaaaacctgaagaaccgcaccgtgttcagcttggacatgggtgctctggtggccggtgcaaagtaccgcggcgagttcgaggaacgcttaaagagcgtgctgaacgaggtgaagaagagcgagggcaagatcatcctcttcatcgatgagctgcacaccatcgtgggtgccggtaagaccgacggcgccatggacgcaggcaacctgctcaagcccatgctggcgcgcggcgagctgcactgcatcggcgcgaccacgctggacgagtaccgtcagtatatcgaaaaagaccccgcactggagcgccggttccaaccggtgcaggtggatgagcccactgtggaggataccatctccatcctgcgcggcctgaaggaacggtacgaggtgttccacggcgtaaagatcaacgatagcgccctgatcgccgctgccaccctttccgaccgctatatcaccgaccgcttcctgccggataaggccatcgaccttgtggatgaagcctgcgccatgatcaagaccgagatggacagcatgcccagcgagatggacgatctggcacaccgtatcactcagctgcagatcgagcaggtgagcctgaaaaaggagaccgatgctctgagccagagccgcttgaaggatctggaaaaggaacttgccgaattgcaggataagttccgcagcatgaaggcaaagtgggagaacgagaagaacgccattggcaaggtgcagactctgcgcgagcagatcgagcagaccaatgccgccatcgagaaagcccagcgcgagtacgacctgaacaaggccgccgaactgaaatacggcaagctgccccagctgcaaaagcagctggccgaagaggaaaaggtggctgccgccaagaaggaggacagcctgctgcgtgaccgcgtgaccgacgaggagatcgcccgcatcgtggcacgctggaccggcatcccggtggagaagctggtggagggcgagcgcgagaagctgctgcatctggacgatgtgctgcaccagcgggtcatcggtcaggacgaggctgtgaccaaggtgagcgaagccattctgcgcagccgcgccggtatcgccaaccccaaccgccccatcggtagcttcctgttcctcggccccaccggcgtgggcaagaccgagctggctaaggcactggcacaggcactgtttgacgacgagcgcaacatggtgcgtatcgatatgaccgaatatatggagaagttcagcgtcagtcgcctgatcggcgcgcctccgggatatgtcggttatgaagagggcggccagctgaccgaggctgtgcgccgcaaaccttacagcgtggtgctgttcgatgaggtggaaaaagcccaccccgatgtgttcaacatcctgttgcaggtgctggatgatggccgcatcacggacagtcagggtcgcaccgtggacttcaagaacacggtcatcatcctgacctccaaccttggcagcgatatcatcctgaacgatctggagcagcgccgtgcgcagggctccaacgagctgagcgaggatgcaaagcaccagatcgacctgctgctcaagagcaagttccgtcccgaatttttgaaccgtctggacgagatcgtctactataagagcctgaccaaggacgaaatgcgcaagatcgtggatctgcaattgcaggatctgcgcaaccgtatggaggagggcaagcacctcaagctggaggtcaccaccgccgccaaggacttcatcattgattctgcctacgacagtgtctatggtgcacgtcccatcaagcgcttcatccagagccgcgtggagaccctgatcgccaaggccatcatcaagggcagttatgccgagggcgataccctgacggtggattatgacggcagcgcattggttctgcgttaaaatttaccggttttgtacatggagtacaggccaaacgcttgcacccgtgtgcagaatatgttattatagaaaataacattgatgtgcttttcatcgtggaaatggcaacgatggaaagcacatttttgtatacggaaaagcccgcttggcacggttgaagcacaatgaaaatacaacgggcaaataaatctaaatttaaaacagaaagttgagtgtgattcccctttttatggacgatggcagtatgacgctctgggtagcgctggtagtattggtggtattctccgcctttttctccgcatccgagaccgcattttcttccctgaatcagatccgcctgaaaagtcgcgccgaggacggcgatacctctgccgcccgggtgctggcaatggctgaaaaatacgataagctgctttccaccatcctcatcggcaacaatatcgtgaacattgccgcagcctccattggcaccatcattttcaccaagatgctgggtgcagagcggggcgctacggtgtccactatggtgctgaccgtggtggtgctgatctttggcgaggtgacccccaagagccttgccaaggagatgccggaaacggtagccaccgcagttgcgccggcgctcagcctgctgatgctggtgtttaccccgctgacatggctgttcagccagtggaagcgctttctggggcactttgtccacagcaccgaggaggacaccatcactgagggcgagctgatgaccatggtcagcgaagccgagaatgacggcgaactgaccgaccgggaaagcgagctgatccgcagcgccatcgagtttgatgatgtggaagtggaagagatcctgaccccccgcgtggatgtgatcgcggtggaggacgatatgccgctggaagaggtggcacagacctttgcggaatccggctactcccgtctgccggtgtaccacgacaccattgataacatcattggtgtggtacatgaaaaggacttctacatggcacgcctgaaaaaggagaccaagctggaggatctggtcaagcccaccctctacaccaccggctccacccagatctcccagctgctgcgtaccctgcgcgagcagcaccatcacatggctgtggtggtggacgagtacggcggcaccgagggcatcatcacgctggaggacattctggaggagctggtaggcgagatctgggatgagcacgacgaggtgaccgaggacttccgcaagcagtcggacggcagttggatcgtgctgggcagcgccggtgtggatgacctgtacgagcggctgggtctgccggaggacgaggatatcgactccaacacggtgaacggtctggtgcaggaaaagacctgccgcctgcccaaggtaggcgaccgctttacgctgggcagctacgacggcgtggtcacccgcaccgccaagcgccgcgtgaccgaggtgcgtctgaccccggcggaaaagcctgacaccaaaaaggacgaagaggaaaaaggccactttggcagaatgacctctaaataaaacactgaccggctgctgcacaaaacgtgcggcagccggtttttcgttacgacccctcccgtgaaaatgcgtttggagcgctccgcggagcgcatttaaaatcgtctaatttgcctataaaaaatccccccggcgagcagcgccggggggattttttcaggatttacttaggctggcggccaatataagccagaatgccgccgtcggcgtagaggatctggccgttcacgaagtcggatgcgtggctggcaaggaacacgcaggggccaaccatgtcctccgggtcgccccagcggcctgcgggggtcttggcaacgatgaagctgtcaaagggatgacggctgccgtccggctgacgctcgcgcaggggcgcggtctgggcggtggcaatgtagccgggacccatgccgttgcactggatgttgtactcgccgtactcggaggcgatgttcttggtcagcatcttcagcgcacccttggcggcggcgtaggcagagacggtctcgcggcctagctcgctcatcatggagcagatgttgatgatcttgcccgcgcgcttttccatcatgtcgggcagcacggccttagagcagttgaaggcaccgcctacatggacgtcgatcacccgcataaagtcggcgtggctcatctcgatcatgggcacgcgcttcatcagaccggcgttgtttaccagaatgtccaccgggccgacctcggccttgatctttgccaccatggcatttacggcgtcctcgtcggaaacgtctgccacatagccgtgggcgtcgatgccggcagccttgtaggcggccatgcccttttctaagctggcctcagaggagcagttgaagcagatgacggcgccgcacttggccatgccctctgcgatggaaaaaccgatgccgtgggcaccgccggtgatcagggctaccttgccctgcaggttgaatgcagacagatccatgaatttctcctttttcacagtatccaagttaattttttagcaaaacgccccgtgccggtttcccggtacggggcgtttgattggtgcttttagcgcaggtcagtggtagcgatgttgtccatgtcgtcaaactccatgttctcgccgcccattgcccagataaacgtatagtttgaggtgcctacgccgctgtgaatgctccaagaggggctgatgacagcatcctcgttgtgcatcacgatgtggcgggtctgggtaggctcgccgcacatatggaacaccacctgcccctcgggcagttcaaagtaggtatagatctccatgcgccgctcgtgggtgtggctgggcatcgtgttccagttggaacccggtgccagctcggtcatacccatgctcagctggcaggtcttcagcacatccgggtggatgaactggttgatggtgcgcttgttgcaggtgtccacactgcccagcgggcggtggtttgcatcagccatcttgatcagacgggtctggtaagcgcagtgtgccggagcagagaccatgtagaacttggcgggatgctccgggtcggcggaagcaaaggtgacttccttggtgccctgcgtaatgtacaggcagtccttatagcccagctcgtactttacgccatcggccaccacgataccggtggaatccttgccgatgttgaacataccgatctcgcggcgctccaggaagtagtgggtgccgaagttggcccagatgtcgatgcccttgtcgatggacacggtctcgtgcaccggcatgcagcccagcgtgaccatacggtccacgtggctgtaaacggccaccacttcatctgccttgtacaggccggtgatcagcatctcgtcccgcatttcctcggtagtatagcgcttaaaatccttctggttgcaggaataacggatatccatggcggactccctcctgcaattagcgctggatacggccggaaccgtcgccgccggccagcttctcgacctcggacacggtcatcatgttgtagtcaccctcgatggagtgcttcagagcggaagcagcaactgcgaactccacagcctcctgggtgctcttgccggtcagcaggctgtagatcaggccgccgccgaaggagtcgccgccgccaacgcggtcgatgatgtgcaggtcgtacttcttggagaagcagtactcgttggaagcaacgtcgtacagcatagcgctccagccgttgtcgaatgcgctgtggctctcacgcagggtgatagccaccttctcgaagtggaacttgtcagccagctgcttggcaacgctcttgtagccctcagcgttcagcttgccgccgtagatatcggtagcctcggcctcgatgccgaacacgtcctttgcgtcctcctcgttggagatgcaaacgtcaacgtactggcacagatcggtcatggcagcgcgggcctgctcacgggtccacagcttgccgcggtagttcaggtcgcagctgatcttcacgccgtgagccttagcagccttgcaggcctcgcggcagatctcgacaacgttctcgcccagagccggggtgatgccggtgaagtggaaccaatccacgccctcgaagatcttgtcccaatcaaagtcggagggctgagccagctggatggcgctgttggcacggtcgtagatgcagacggaaccacgctgagaagcgcccttctcgttgtagtagatgcccacacggtcaccaccgcgggtgatcatgctggtatcaacgccgtagcggcgcaggctgttgacagcggcctgaccgatggcgtgtgcgggcagcttggtaacaaaagctgcgtccagaccgtagttggccagagaaacagcaacgttagcctcgccgccgccgaagctgaactccaggctgttagcctgaacgaaacgctcgtagttgaagggctgcagacggaccatcagttcgccaaaagtaacgactttcattggttattctcctttatatcaggtgtttcatcatcccgccgcagggcatacccgctgcggcggggcttttacggtaaaagggggacaggcgcttatgcctgcaccagatggaaggcaaagccggcgatctcgtctgccatgtagcaggcaacggtcttgccgttcttcacgttcttgctgtccagatcgaacttcacgccacgctgagacaggtggtagatggcgcggtccacgttgttgcagccgatggcgatgtggccattggtgccgcggccgggcttcttcatgatctcgaactccttgttgccgacaaagatgctggagttgccgggagcgaccttcatgttcagcatagcgccgatcaggttagccaccttcatggcctcttcctcgttgccggtgttgatgccgacatgcagcagcttcaggcccagcatggtgtcaacagcttccttgctctgtgcagtgatctttgcccagtcgccggccttgatcacatcgctcttgcacatccaggtgccgcccacggcaaagatctggtcatagcccagataatcgttgacgttcttggcgttgacaccgccggtgcacatccagcgtgcgcccttcagggcagcgccgatgttcttcagcatgcccacgccgccgtttgcctcagcggggaagaacttcagagcctcgcagcccatgttcatggcctgctgcatctcgcctgcggagcaggtgccgggcatcatgatgccgcccttggcgatgacgtgcttgcagacctcggggtcgaagccgggagcaacgatgaaggaagcaccggcagccatagcacggtcggcctgctcgcaggtcagaacggtgccggcacccagcagcatctcgggcatctcctcgtggatcttgcggatgcactcttcagcacaggcagtgcggaaggtgacctcagctgcgggcagaccgccctcagacagagccttgcacaggggcagggcctcatcaacgctgttgaaagcgataacagggataatgccgatctgatagaccttttctacgatgggattcataacgcatttctccttttatatttgaactctctcggtgcgtcgggtttgctccagtgggcgcaatacccccatacgcgcttatagtactagtataaacgaacagcccgtctttggtaatactcaacaagcacaatgttttgcataagagcttgtatacattgcacaaaaatgacgaatgccccgaaaaatcggggcaaatgccggtaaaaatgctggaaaattgctgcaaaaactggctcagatgccaagggtttccagtatctcggccacgccgtcgtggtcgcagtcggctttgctgacaaggtgcgccagcgcccggatctccggcatgccgttgaccatcacagcggctaccccggccttttgcagcatggcgcggtcgttctcgctgtcgcccaccgcaagggtgcattcgtgggggacgcccagccggtcggccagtgcgcgcagcgcctcacccttgtccacaccggcggcggtcacctccacgtttttcggcgacccctgtacgatctctacgcccgggacggcgcggaagcggggcagcgcagacgtagcctgctgcggggtttcaaagaatacgcagagcttttcaatggcaaaggcgttgcggctcatccactcggctgcgtcccgcagaatggtaaagcggccatcgttgggctggcacgcttcggtgccgtccttctttgctgcccgggcagcggccagcgctatgctgtgggcatcggtgcaggcgtatccgtccgagaaaatgcgcaggtcggcgtggcagctctcgcagacggcaaaggcttcgcgggcagtctccaccggcatcaggctgtgcagcaggcagaccggggtgctggtgcggtgctcttttgcgttggaatagcggctgtacactgcgcccacggggtcgctgcccaaatcccacacggcggcaccgttgcaggtgatgacgtagcggatgccgggcagctgcgccacctccggcggcagactggccagcggacggccggtggcgggcacgatgtacacgcctttatccacagcagcttgcagagcggcgcgggtgcggggggtgacgtgcccctcgcggttcagcagggtgccgtccagatccagcgcgaccagacggatggcgggaaattcttgtgacatgacgtactccttttataaataagatgcagcttgtttttattgtatcgcagggaaaacatttgcgcaagtggacggaatgtgctataataacacgtcaattcacataaaaaataggagaaacgacatgaaacttagccaactgcgcagccggtgccgcccgcatttgtggtaccagctgtactgggtggtgtacctgctctggttcttctggctggatctcaccgtcaccgccccgaaatatatcattcacagcccgctggacgatctgatccccttcaacgagtggttcgtgctcccttattgcagctggtttctgctgctggcgggagtgacggcggcgctgtggtggtgcgataccgccacctacgataagctttgcctgaccatgttttccggcatgaccttctgcctgatcgtgtacatgatcctgcccaacgggctggaactgcgtcctgccgtggagactcttggccgggataacccggcgctgcggatcatgcagctgctgtggaaggcggacgccgccgtgaacgtctgcccctccatccactgccagagctctgcctgcatggcaatggctttcagccacagcaagctggcagagggcaagcctctgcgcaaggtgctggcatgggcgtgggcggcgctgatctgcctgtccaccgtgttcaccaagcagcactcggtcattgatgtggcctgcggcttggcggtggcttttgtgtggctgccggtggtgtaccgcccggcgcgggcacttcattgaacaaaatagcaaaaaattgcccttgattttcggctgctcctgctattgacagttgcccggcagttgggtaatatggtcatatactagtatatcaccaactgaccccgaagggagaacactgcaatggcatctttgagtgcgagggaacaggcgtatcagaccatccgcagccggatcatcaccatggagctgaagcccggcgaccccctgaacgacagggagcttgcggagcagatgggcatcagccgcacccccatgagggaggcgctgatcatgctcaacattgcccacatggtggacatcaagccgcaaagcggtacccatgtggcgcccattgacctgaagcggatggagctggagcagtttgcccgcttcaccctggaaaaagagattttgaaccgggtgcgcggccgcttgaccgaccagcaggagcaggagtaccggcaggtcatcgagaactaccgcttactggaagccgacctgacccagccgaaccgggagacccgcctgctggaactggacaaccagttccaccgcaaggcctttgagatcaccggcatggaggcgcattttgaccatatgctgagtgagctgcagcatgtggagcgcatccgcaagttcagcttgcagaccaacgagaacaagtccgtctgcgccgcccacacccgcattctggaaatggtgctgcacggcaccgccgatgaactgggcgaagcgctggaaagccacctgaaccgctataagctctcggtggagcaggcccgcagcgtccacccggagtatttcaccgaagggtgaaaagaaattgtttaaatatggctccaaacacctgcaggtgttttggagccatatttatttatacaatataaaaagcccgccggcagagcagtgcatcgctgtctgtcggcgggctttttgttaagcagcgggggaaaaggttagttctgattgccggtctcggctttcatggcgttgtagccgatgagcacggtccagacgtaggcgcaggttttggggatcatcagcataccgatcatggggtttacgtctgcccacagcaccacggggatatagaagccgaagctcagcacgatggtcagccacatccagcggaaagccttgtcgttgttctgcttggcgctgcggtagaacagcacgatgatcagcagacccagcagggcaaagggcacattgcgcaggatgccccatgccagcggggtgtgattggtgagccactggttctgcggcatcatacacagcacgatgcgcacagcggacagggcgtacacggcggcggtcacgttcttctgtccttcgatctggtagcgcttgcgccagacgtagtacagcagcacatagaacacggtcatggtcacagaggtgatccacttgcccagccccagcggcacagcgtagttttccagaccggtggtgcacagtgccagtgcgcggggcaccagatggaaggcgtcgcccgcgcccagcacaacggccatcaggccgaacaggcggaactgggtgccagtcttgctatcgcggatcatgcggatgcccaccgtgagcacggtgaccagatagaagatgtcgaaaacagtttcaataacagctctcatacgtttttctcctttatttgttttgattgcagttttttgattttatagcgaaccggcgcggcagagccgtaccggaagcatcatagggaaaagggcttgcagtagtatagtctgcggggcgcagaaaccaaattgaactatgttcacattcgggcttaaaaaactcccacaaggcttgtgggatgtttttttgcttaataaatggtcctgcgcacgatctccagcaccgcagaggggtcgaagttctgctgcaccaccgcggacagcatcagggagaacaggatgcccgcaaactgttccggggtgaattgctcggtaaaagcacccggacggatcttggcatcgtggcgcagcacgttgcacaaagcatccagaatgtgctgccatgtctgccgcatctgctgcttgccattggcagtgtcctgccgcacaaaacccagcgcatggtgggtgaaaaagccgggatactgctggcagccgtattccatctgccggtacatccaccggatgcaggacagggtgtcctgaaacacggcttcgtcctccgggtggtggaagatgtcgttccagatgctttccacggccgcgcttaccagctcggtcttggagccgaagtagttgtagatgcagcccacagagaccccgcaggcggccgcgaccgcacggatgttgaccgctgcccagccgttctgctggatcagctcccggctggttttcaggatgtccgccttggacgttgccattggattcatacactcaccctctaacatgaacactgttcacgatgcacagtatacagcggcggtgggctgttgtcaaggggaaaataaaattttttgcagctctatttcgccgtctgcacagcggcaggaaacgaaagctgcatatatgcaacctgtttcatgtttctgccacctaaaatgtgccaaattcatgtcaaaatggtaacagttcttgtttcatcgttgatttttgacgaaaaaagcttgctttttttgtcaatgtgcgtataataagagaacatcagcccaaccaaggcagttggtatgctgccgggggctgacaccaacaaaagacgaaaaaggagataatccctatgaagctcaagactgttgcaattgccgctgccgctctggcactggctgtcggcatgaccgcctgcggcggcgctgcctctaccgctgcatcctccaccgcatcctctgctgctgcctcttccgaggctgcttcctccgaggctgcttcctctgaggctgaggccacttctgccgagtacaccgtgtacaacaccaccggcagcaaggtgactgagctgtacctgtacgatgcaggctctgaggacaagggcgagaacctggcaggcgagggtctggctgacggcgagagcatcgtcatcacccgcgatgtcgaggctgacaagcaggatgacgttgtctacgttctggagttcaccaccgaggacggcaatacccagagctttgacaccctgcactacgaggtggctcccatctctctgaagagcgtggacgccgctgccggtgctaccgctattgctttcgaggctccccagaagtaagagcaaacccttacatccgcaaacagaaaaaggctgctgcaccgtgcgtgcagcagccttttttgtataaaatcatatcacatccggaacccacggaagccccagccgccgcagcagcagttgcacagcaggttcagcaaaatcatgctccagcaccagcgcaaaagcccgccgggctgggcgtaggtggtctgggtgcggtaggtctggccggggttctgcatccggcgcaggtgcatctggtactcggtgttgtttgggtccagttgcacggcgcggcgggcgtcctgcaaagcgtccacgcttttgcccagcccctgattggccagcgaagagaggtaataccaccgcgcattgcggccggtcatgccgtccagtacgcggcgcgcttcggcgtagcggccattggccacaaaattgcgggcggcctgcatctccggggtgtcggtgccggaggcgctgggcccggcctgctgatagccgccaaagccaaaaccgaagccaaaggggtcgaagccttcaaacccgtcaaagccatcaaagccggtgtagccgtaattctgctggccgtagccctgctggccatagctctggcggttatagctctgttgctggtagccgccgtaggggttgccgcccatctgggggccggtatcgcccttggtaatggcatcgtaggcggcctgcacctccttgaagtgctcctcggccgtggggtcgttggggttcaaatccgggtgccagcgtttgcacttggcgcggtatgcttttttgatctcgtcgtcgcttgcgccgcgctgaacgcccagcacctcatagggatctctcatgctcggtatacttcctcactcattatactgacggtacagcaccgctgcaccgcatccgttttattttaccggaacatcggcacaaaatcaagatgcatcgggctttccggtgcgttttgcgtttttgcagttgtatttcagccatacgccggaatacaggatgttgcgcagcaggtccacgtcctccacgcagggcagacgctcaaagttctgcgcgcagcgtgccagcagcagctcgaagatgtccagcatctcttcctcgtagtccgggtgggtgctcagctcccgcaggggattgtacgcgccccggcgcttgtcgcgggacaggtcgtcgtaggcgtccagcaggtagatgaacttgcccagatgaaagccgatgctgcgcagctccggtgcccagcgatcctgccggtagtcgaacagctctgccatcagcgcaccgaagcagccggacaccgcgtcaaggtcggtgctgccggcggcctcgtactcggcaagctttgcgagacacgcacggatggcattgcactgccgcggccagcgcagggcggcctcggcggtgctgttgtccagcagggtactgtaccccagtgccagcagattatggtcatcctgccatttgtcctgtgcgttatagtagtgcagcgccacactcaggtcggcgcagtagtcggtagggtcggcgctgcgccaaagtacaccgtgtaccgggtggatggggcagcggctgatgccgctgtctgcgggggtctcgccctcgtacaggctgcacagcagaatgtttaaaaaggtcaggtcatagctcaggctgaaccgtccccgcagcccgtgcagagcatcgatgcggcggcacagcccgcagtaggccgagcggtagcggctctgcgcctcggggctgaggctggcccgatccgggatcacatatccgaacatggcggctcagctctttttgatgaactgggtgccgcagcgggggcaggagatctggatgcggccgcgtccccggggcacccgcagcttctgacggcactgggggcagcggtagtagtggtacagcttgcggttggcccactgctccttcaggctgcggaacttgttattgaaccggtccttcaggctgtaaaagcggtagttctcctcggtgcgcttggaaatgttgcggctcaggctgcggtagtagcacaggatcagcagcgctgcgcccagccatgtgaacagggaaatgcgggtgagcagcgataccagcagcatcacgatggagctcatgctcaaaaactggttcaggccatcggtgccgtagcgcccgatcatgaattgacggaacttttctctcataggttttcgcatcctcttctctggggctttacacacggaaacgcagggcagcagcgccgccctgcggaatactttgtacctttaggatatcagccaaccatgataaaattttgaacagactgcaaatctatcatgaaaggacgaaaattaaacgttttgctcctcccggctgcgtacggtgagcaccgcttcggtgtccagtgcgccctccatgcgacagtgcagcacggcgcgtccggcctcgccggtggtggcaaggtaggtgcccgccatgccgccccgcaggggcaccacgctggggcccagaattttcagcggcccctccacggacaggcagacggcctcgccgcagtagggcagcaggttgccgttctggtcgatggcgcgcaggctgaccgcggcgcagtcccatgtggggccgtcggtcagcaggggattgtgcacggtgcattccagtcggacgctctgcaccggctcccgcaccacggtgcgcacggcgcggccatgccacaccgcctcgaaccggtacaccggcgcggaactgcccagcacaccgatgtatttgtagtacatccgcagcagctcgctccagctcagccgcagcgagagcatccgcgccttggaaaggggcgaaagcgccatggcgtcccgccgcagctcgttgaggatggcggcgacctgtgcgccggtggcgtgatccatgccctcatacttttccagcagcgagcccacaaaatcgttgatctcgatgggcgggtggggcagggcggcaaagcgtccccggcggtcggggccaaactctgccacaaaatcgttgccgcggtacagccgcacgctctcggcgttggtgaacacccagcaggcggctgctgcgccgccgggcaggtcgcccagcgtcatggcggaggagacctccagcacgatgtcagagggggcgcggggcgttttctggctggcgtagacggcggcggagagtttcgggttgcggaacaggtccattacgccgtggtagcagatgcggtcgccgctgccgaactcccggtgggtgttgtagtcggccatgcaccagccaaagctgcccgccacgcccggctgggcgatgctgtcgttcagcacagcggcgtggtgcagcgcctgcaccagacggtgaggttcatcgtcaaagggcttggcggggaagttctgtccaccgaactcgctgataaggtagcccttgcgggtgtcgggagtcacggcggcgcggttctcgcagcccgcgccgcgcccagcgtaggaataatcattgtaggcgtaaacgtcctccagcagctggcttttgcgggtgctgcgggtgcccgccgtggggcgggtggggtccagccggtggatggcttcgttggtgcgcttataaaaggcctcgttgtcggggctgccgctgatgcgggcaccccacaaaaagatgctgggatggttgcggtactggcacaccatctcccggcagttttgcagcgcctgcgcctgccagacctcatcgccgatgtgctgccagccgggcatttcggggaataccagcagacccagttcgtcgcaggcgtccagaaacgccgggctggggggcgcatagcaggtgcgcacggcgttgcagcccaactcctttttcagcagctgggcgtccagccgctggatgctgtccggcatggcgtagccctgataggggtagctctggtgccggtcaaggccgcgcagctccacccgctgtccgttcaggtatagcccgcctgccacgaactgcacggtgcggaagccgaaccgcaccgttttttcgtccagcacccggtcgggcagaccgccggtgccggggcggatgagccgcatggtcagggtgtacagggtggggtgctctaagctccacgggtgcacgttgttcagtgtgccggtgatgggcagggaaagctcgccgctgtacactgcccggctcccggcggggctgcggatctcggcctgcagcgtgcagccgaccgtctcgcccacggtggcggtgtagatgcggaaatcgccctcggcctttgcctcgatgaacacgtcccgcaggtaggcgggctccttgatatccagactgacggcgcggtagatgccgccgtaggtcagcgcatccagctgcccgccgaagggcgggacgttcagatcctcccggcagtcgcagcgcacagccaccacgtttttctgtcccagacgcagcgcgccggtcaggtctaccgtaaaggcggtgtagccgcagccatggtggaacacccgccgcccgttgcagaacacggtggcgtcgtgcgccaccgccccgaaggtaagcagcacggtgcggcccagccactccttgggcgcaaaaaactcccgccggtagccgcacaggcgctggtagtcgttttcattgcagtagttatagggcagaggcttgaccgtgtggggcagccgcaccggggtaagggaaagctccgggcactccgggcgcaccagcgccgggtcaaaggtgggggcaaacagccagccctcgttccaatcgtagtgttccatagcaggatctccgtctgagtgatatgcttatagaggtatggtatcacaaagttatgaacgaaaaaagcattcgcgccccttttgtgccggaacagcagaaattttgcagtgcgcgaaagctgccgctgacaggttgcccaataaatgcggggtgaagattgtgcaactatccaaaaaataaaaggaaggggaaaaaggggctgaaaatgccgcaaaaagcggtacaataaaaaacggaagtataagggtgtgcttccggtgcaaataaaatagaaaggaattatgaaccatgaaacgaatccttgcggtgtttctgacattggcaatggcgctgaacattgcgcctgcggctgcttttgcggctgcggacagcgatgcggcatccattgttgcagtggaagaaaccgacgaaacctcctcgccccagctggacgaggaaacggcgagagccattgcgtccgacccgtttttgcaggcagcctatgcccaaacggagcaggagcagaccggacaggctgaggtggatacctctaatatgtccgtaagtgcgaccaacagctttggtcagctgctggtgaatggtctggggatggacggagagaacgggagtgatctctcatcggaaagccgcgtcattgagatcaccatgaacggcagtaccgccatggtgaaatatatcgcgaaaaaagacgcaaaccttgtggtgggcatctatacggatgatagcgaacaggaaatgatcgctagcggaacagtggcggtacaggcaacaccggacaacacggcaagcagcatagtagaagttccgttgagtggagaaataccggaacactatactgtgaaaggtttccttctggacaaggaagatcatgcaccactctgcaaggagtacacaaatgcgttttacacagaaaacgtggaagagctggagggtgctacgatcgatgattttgattcagcacgggcggtcaatttggatgatgacagaaccacgaactttggtgttgtgaagcaaggcgttatacttcttcaagaggatgaaccggaaaacggtgcaggggaaaatattgttgttctggacgacagtgaaaaccagatataccagttcgaaaacgcaagtacagagcttctgaacctgaagcaaggtaatatcattgtttataaatatggcgaaaataaccttattattgcgcatgttgcagattttgaaatcaacggaaccacagtcacgatttatggtgacgaggattttcagttggaagatgtgtttagtattctgaaaatggatggcgagaacacaacggataaagcaattgtggatacggagaccggggacggcaaggtgtcctatattggaacacaagagatagaaacgctggatagcacaaacgaatgggaaggaaaagcagagtttagtcacgttttcaaaatttcaacggatgacgggaaagatgaggattcggaagaaaaacctgtttccggttcggttgagggaacggtgtcgatcaaagcggcaatcaagttaaagctccggctctgcgatgacaataaaatggtttcactgtccttcccgatgacagagaaatttgagcttgagggcgcggtcgaatacaaaggagagcttctgaaatttccgaagataactcttcctgtctatgggtgtctttcggtaggatttgagccgcaaatggtgttcaaggcaaatgcatctgtggcctttaaaatggacagtactcagatgatcggctttgaatggagccaaaaagatggcacgcagaatatcagtgaggcacctgttacaagcatcaacttcaagttgagcggatcgatctatctgggctttgatatggctcccaaagcagagcttggcgtaggcaaggtaagtctggtaaagctgaaattcaaagcggaagccggatttgaactttctgcagaagagcgattgggagatcaggggacaggtctggatgaaattcatggctgtaaaaattgctatgagggagaattggaatttaaaataacgcttggcgtaagcttaaagattttgctctatgagccaaagatcgagataacgcctttctcccatagttttggcaaggcatacgcttcagcagactacggtgattttggctggggcgagtgtcctcatgtaaaataccgtctgacattgaaagcgggcaaagcgggtgcaggtgcaactgtgaagattcagtcgaatgattctgacacatcgagcctttataccgaaacgacattggatgcagacggaaacagtacggtctatcttccgggacgagaatatcggatcattgccgataagggcagcatggaatttgtaaagacaatcaagctgtcccgcggaattacagtggacatcgacctggaacaaggttcgaccggcggaaaccctggaaccacagacccggatacccctgaccctgataaacccgacccggacaatcccgaccccgacccgactcccccgagtgagaccattgtggcatccggtacctgtggggataacctgacgtggaagctggatgatgagggaactttaactatcagtggcaaaggggcgatgactgaatgggttaatagtgattctgctccttggaaaacatacagcaacacaataaataaggtggtgattcagcctggtgtaacaagcatcggaggacatgcgttttctaagtgcaaaaatctgacgagcattacgataccagaaggtgtaacaagcataggatccgatgcttttagcgggtgtagtagtttgacgagcattacgataccagaaggtgtaacaagcatcggagaatatgcgttttatgcatgcgaaaatctgaagagcattacaattccaaaaagtgtaacaagcataggaaactatgcttttggagggtgtagtagcttgacgagcattacgataccagaaggtgtaacaagtatcgaaggtggtgtcttttataagtgtagcagcttgacgagcattacgattccagaaagtgtaacaagtatcggatggtatgcttttcaagggtgtagtagcttgacgagcattacgattccagaaagtgtaacaagtatcggatggtatgcttttcaagggtgtagtagcttgacgagcattacgataccagaaggtgtaacaagcatcggaaaaaatgagttttctgggtgcaaaaatctgacgagcattacgattccggaaggcgtaacaatcatagaagccgaggcttttagagggtgtagtagtttgacgagcattacgattccggaaggcgtaacaaacataggagagaatgcttttagagggtgtagtagtttgacgagcattacgataccaaaaggtgtaacaagcatcgaatggggtacttttcgagggtgtagtagtttgaagagcattacgattccagaaagagtaacaagcatcggagaatatgcgttttatgcatgcgacggtctaattgacgtgacatatcatagtacgatggagcggtgggagaaaatttctattgaaagcaacaactactaccttttgaatgccaccatccactgcaccgatggcgacattgtccccaatacggaaaactccatcaccaccggtacggcttccacctcggacagcaagttccaagctgcctttgccgaggccaaggcgggcaaggagtacgtggtgctggtcagccgctccggcagtgacccgctgaatgcggacaacctgatctacatcaaccagatcacggcagatgccgatggtgagctgactgtgccgtttattacggcagcagacgcagcagagatgacctatgtggtcgcctgcgcacaggatgatgcaacggtcgaacccggccagccggacaaaccgaaccagccggatcagcccggcggggacaagcccggcggggaccagccctcttccggcgatgacggcggcggcgcggccattatcctgatcggcggcgtagcagccgtggcggcggtagctggtgtggcgctgatgatgccggtcaaggtggaaggcactgtgaagctggcagaccagccggtggcaaatgctaccgtgcaggtgctgaagaacggcaatgtggcagcacagaccaccacggacgcaaacggccactttaccgtcaaggtaaagcgcggcggctataccctgcgtgtgcagtggacggacgccagcggccagcctgctgtgcgcacggtggacttcaaggcacccaacgcaaacctgaacgtggcggcataagctgcgcgtaacagaaaagcagacccaataaaaagaccggaacggccttgcccttcaggggcagagcggttccggtcttttgcacgcttttttagcggataaagttggtcatggggcggggcgggttctgcgggtggtcgataccggcggccttaccggcctcgatgcagcgcagcagccatgccatgttgcggcccagttcctgcatcacggcgcagccctcggcgtcctgcagtacctgctcggggttggagccgtgcaccatggcccagtaggagccgttgaccagcggcatgtggaagaactgggggtatttgaccagctggtcaagggtggaggtggtaccggcgcggcgggcagagcagcagacggcggcgggcttgtaggccagatacttgccgcccgcgtaggccagacggtccataaagctggccatgttgcccgcagcggaggcgtagtgcaccgggctgccgaacacaaaggcgtcggcggtcttggccttctcaatggcctcgttgaccacgccgccgaacacgcatccgttgccgctgcggcagccgccgcagccgatgcagccgcctacgggctgaccgccgacgtgcaggatctcggtctcgatgccctgtgccttcagctccccggcaataagggaaagggcggtgtaggtgcagcccttctcgtgggggctgccgttgatgagcagaactttcatgctgtatactctcctttgctgaaatgcgccgtaaaatgcgcaatattgctgctatgattgtagcacaaagccgcccgcagcgcaatgcgggctcttgacaatgctatgcagttgggagataataaaggatacgaaagagttcaaaccggctgccgcgggggcggcagctacggcaaggaggtaacatcatgcgcgtgatcgcaggagaagcccggggccgcaggctggaagctctgcccggcaccgatgtcacccgccccaccctctcgcaggttaaagaggcgatgttcagcatcgtacagttcgacctgcccggggcccgggtgctggatctgtatgccggcagcggccagctgggcatcgaggcgctcagccggggtgcggcccggtgcgtctttctggacgagaaccgggaggccgtaagcatcgtgatgcgcaactgcaaggcctgcggcgtgttcgaccgcagccgggtgaatatcggcgaggctgcgcggttcttatcggcctgccgggaacagttcgatctggtgctgctggacccgcccttccgtggcggtacgctggaaaagatcctgcccgccgtggaaaagtgcgttgcccccggcggcatcgtgctgtgcgagagtgaaacaggcatcgtgctgcccgcgcagacgggcagtctgaccctgcagaaacagtataaatacggcaaggtgctgctgtggaagtacacaaagcccatgcagtccgccgctgggcaggagggagaagccttatgaacgtgaacgagcttttggataccattgaggatgcactggaagagagcgcaaatgtgcccctttccggcggcaagcgcatcgtggatgtggagcagatccgggattatctggacgaggtgcgggcggcattgcccggcgagctgcggcaggcgcagcagatcgtgaacgaccgggcacagatcgtggacagcgccaacgcacaggcacaggccattgtgaaaaaggccgaggagcgcgcccgcattctggtcagcgacgccgagatcgtcaaggccgcccagcagcgcgcttctgagatcacctccgcagcccagaccgaggcgcgcaccctgcgccagaccgtgaccgactactgcgagaatatgctgcgcaccaccgaggacaccatggtggaaaacgccgcacaggtcaaaaatatccgtgccagcctgcgccagaacgccaagaaaaacggctgataacggtcaactttccacacaaattccacagattgcggaaaacgaagtccctgcgagcagaaatgacggctcacagggactttttttgtggatttttgcggcaaaaagccgcccaaaaacccttgcattcacgaacttgatttgctacaataaagatgtatcagtggggcaaagtgggtaaaagtagggcacacgccctgaaaacgcccctgaaagggggagcagcgcgtgttttttggccgttatgattacaccatcgacaccaaagggcggctgaacttccccgcaaaattccgcgatgccatgggcgagagtttcgtggtgctggaatgggtggacagctgcctgttcgcactgcccatggaagaagtggagcggctggcggacaagctggaaagcgatgaactgatggacagctgggctatctccggcgacctgttcagcaccgcctgcgaggtggcgccggacaagcaaggacgcatcctgctgcccgcagagctgcgcacctacgccggactgaaaaaggacgtgaccatcatcggcaaccgcaaccatgctgagatctgggccaccgaagtctggaacgcccgccgcgccgccgtgaccaacgaccagcgcgccgagcggctgcgcaagttgcacctctgatgcaaaaaactaaaaccgagaaaggaggccgtgccaatggcctttgaagaacagcagccctttgacccggcctcgtttgagcatatccccgttttgctgaacgagtgcctgacggggcttgccattgatccggcgggcacctatctggacggcaccgcgggcggcgcgggacattcccgccagatcgccttgcggctggacgccgccaagggcggcaggctcatctcgctggatcaggacccggacgcggtgcagaccgcgcgctcccgtctggccgggctgcctgccaccgtggtgcagatcaatttccgctatgcgggacaggcgctggagcagctgggcattgaaaagatcaacggcgcactgctggatcttggcgtttccagccatcagctggacgatgctgcccggggcttttcctaccgggcagacgcgccgctggatatgcgcatgagccaacagggcgagaccgccgcagaccttgtgaacaccgaaagccgcgaggaactggcccgcatcctgcgggattacggcgaggagccctatgcgtggcagatcgcaggaaagatcgtggaggcgcgggaaaccgctcccatcctgaccaccctgcagctggcagatatcgtagcaagcgccatgcccccggcagagcgccgcaagaacaagaacccctcccgccgcacctttcaggcactgcgcattgcagtgaaccacgagttggatgcgctggaagagggcttggataccattttcgatcaccttgcaccgggcggccggttgtgcgtgatcaccttccattctctggaggaccggctggtcaagaacaaattccgccgctggtccacagcctgtacctgcccgccggagtttccggtgtgtatatgcggcggcaaggcaaaggcaaagcttatcacccgcaaacccattgaagctgatacgcaggaactggaggagaaccggcgcagccgttccgcccacctgcgtgtgctggaaaaatgctgagatgccggaagcaccggcattgtgaggaggagagaaaccatgggtcagccagcatatgatcgtaatgcggtgcgccgccgcagggcaccgcagccgcagcgcaaagcaaacctgcgggtagcaaagggcggcaagcggcggttgaacccgctgcaggccgccgtacataacgccatgaatctggtggcggcagcactgctggtgggctttgccatcagtctgctgtggagcgaggcacagctggtggagctgaacgaccagatccaagccactaaggcgcagctggtcagcgagcagagccagtatacctactacaacagcaccctgaacagcaagaccaacattgccagcgtggaagagaccgcagggcggctgggtctgatgaaagtagacccaagccagatcacctacatccgcctaggcgaaagcggcgcactggtgcgccgggagtccaccgtgcggcaatggaccgactttttgtacaccggcgcggtgaacattctgggcaccgtgagataaccgaagaaagcgtgcggcagcgcacgcttttttcggtttatggacaccgcagtctgaataaataacagcgcagggcgcgcggaatgcagtgcacgccccgcaggagagaaccaatgcaagaacctttccgtaacaaaaaaaacaggggctaccgcctgcgtccggcctccggccgggatcggctggacagccgggtgcggcggctttgcagccgtctgggcatccttgcggtggtggtggcggcagccatcgtcatccgcagcctgtataatatccagatcctccacggggcagagtaccgccagtacgccgcccagcagcagctgctggataccaccatcaaggccacccgcggcgagatctacgatgcctccggcatcacccttgcctccaccagcgtggtgtggactatctgggcagaccccagttacagcagcatcctttataccagcaagaccaacgatgacgacaccgtgaccaaaacgctggaccccgccatgtgcgccgaggtgagccgggagctgacgttgcgtctgctctccggggacggcgagagcttggacagcgtggacacttcctcggcagagtatcagcagcagtaccagaccgtttacgatgcactatcccggctggattctgcctacgtcacccttgccaccaaggtgaacaacgcggtgaagctttccattgaaaaatacgtcaccagcttcaacaaggcgcacaaaaaggccaccgatacctcccgcaaggggcgcatctcggtgtcctcggaaaaaagcttccagcgcaactacccctacggcgcctttgccgcagcggtgctgggctttacggatgcggacggcgtcggcacctacggactggaaaaatcctaccagtccaccttggccggtgtggatggccgcaccatcacccagcgcaacgcggtgggcaacgccattgcagacgctaacgccaccacctttgccgccaaggacggctccaatctggtgctgtcgctggatgtgaacgtgcaggagatcgcggagcggtacctgaacgaagccattgcagccaatacggtggaaaaccgcggctgcgccattgtgatggacgtcaagaccggtgccatccttgccatggcctccaaaccggactttgaccccaacgacccgctgaacttcactgccaacgaggcttacctcaacgagctggtgcacgcagagccggaactttacggcatctataaaaaggatgccgacggcaactacatcaccgatgagctgggcaacaagattctggacgaagaagcggactattccggttactaccgggatatcctgtggaaaaacaagaccatcactgagctgtactacccgggctctgtgttcaaggtcattacctccgccatgggcatcgactccggtgtggccaccatgaacaccacctttacctgctctggcgcttacggcgtagccaaggagacctaccactgcgcagggcgcaaggcgcacggcctgctcaatatggctgaggcgctgcgcaagagctgcaacatctactacatccagctggggcagcgcgtcggctcgcagcagttctataactacttcgatgccttcggctttaccgcccgcaccggggtggacctgcccagcgagaccaactttatgcagtactaccgcgccgaccagctgggcgaggtgcagctggcttcctcctccttcggtcaggccatggccatcaccccgctgcagatgtgcaccgccattgcggccaccgtcaacggcgggtatctggtcaccccccatgtggtggataagatcaccgatgccaacggcaatgtcattcaggagatcggcgcaaatgtgcgccgtcaggtcatcagccagagcgccagcgaggttatccggcagatgatggagtacgaggtgggcaacggcaccggcggcggcaaaaacgcctatgtgtctggctaccgcatcggcggcaagtccggcacctccgagcagctgaatatgcaccgccgcgccgacggcgactataaaaaggtggcctccttcgtggcggtgctgcccgccaacgacccggaaattctggtctacgtcatgctggacgaccccaacaacgcccggacggactactcctccatccttgcagcccctgtggcgggcaatatcatcagcgaggtggccccttatcttggcatcgccaccgacggcgaggaccgcagcggcaccatcgttacggtgccgaaccttgtgggcaccgagtggagcaatgcgcaggtgcagctgaacattcagggcttgaagcatcagctgcaggaaagccagagcagccagtccgctgccccggtcacctaccagtacccccacgcggggagcaaggtgccctacggcaccaccatctacctgtataccgatacctacgagggcagccgcaccgaggtgccggatgtgaccggcaagagcccggactttgcccgccagatgctgagcgccgccgggctgaattgcgtggtggagggcagcggcacggtgcaggcgcaaagcgatgagcccggctccagcgtgcagcgcggcaccatcatcaccctgacctgtgggtaaaacagctttttcggcatcctcgcccaaggctttcagcataaagcactgccgcaaagcagtgacggatgagggtgcagcattcaatagaacgagaggggatagaacaatggaaaagatccatgcaagcaagcttctggcagggctggtgcctgccggaaaactgaccagtgacccggaggtggaactggtcaccaccgacagccgtgaggtaaagcccggctgcatttttgtggccttccccggcgagcggttcgacggccatgatttcgccgcccgtgcgctggagcagggcgcggagtatgtggtggtcaaccaccccgtgcccggtgtgccggaagaaaaggccatcctttgcccggacagctaccacgctatgatggtgatgggcgcaaactaccgcagccagtaccaccccaagatggtgggcgtgaccggcagtgtgggcaagaccaccaccaagcagatgacctacgccgccctgagcagctttggcgagaccatcaagaccgagggcaaccagaacaatgaactgggcatgccccgcaccctgatgcggctggaaagcagcaccgagtacgcggtcatcgagatgggcatgagtcacgccggcgagatcgaccgtctggcgcgggcagcacggccggatgtgggcatcatcacctgcatcggcgtgtctcacatcggcaatctgggcagtcaggagaacatctgcaaggcaaagctggagatctgcaacggtctgccggagggcgcgccgctggtgctgaactacgatgaccccttcctgcgcaaggcagtactgcccgcccatgtgcgcccggtgtggttcagcctgagcgatgaaaacgcagacgtctgcgccctgtccatccggcaggagactgacggcatgagctttgtgctggaagatcaggagcacggcacctttgtggtgaacatccccgccatgggacgccacaatgtggcgaacgccttggctgcctactgcgccgctacccgtctgggctgcgacgccaagagggtcgtccggggcctttccaactttgagcagaccggccgccgccagaaggtggtggacagcgagggcgtgaccgtcatcgaggactgctacaacgcaaatccggacagcatgaaggccgcgctggcgatgttcaaggatttcccctgcaagcgccgctttgccctgctgggcgatatgctggagctgggcgagctgagccgcgaagcacacgaggagctgggacgtcttgccgccgagagcgggctgtattgcctgatcacctacggcgagcaggccaagcgcaccgccgtggtggctgccgccaagggggtaaagaccctgcacgcggacagctaccgcgaggctgccgatgccctgctggaccgggtggagcccggcgatgccgttctggtaaaggccagccacggcatggcactggaaaaagtgctggatatcttctacgaagagcataaagaagcagaagtttaactgtttggcgaaatggagtgtctgagttatggagcgtttcgccttggcagcggcggtggtgctgggctttgcccttacggcagccctgtgcagcctgtttgtgccgctgcggcgggtgctggaacgccgcgaacaaaaccagcagccggtacagcctgagcagccccggcctgcacccctgcgcgccccgctgtggggtgggctgtgtgcggcggcaggcacggtggctgcggtgggcgtgggctggcttgctgcctgcgtaggccagccggagctgctgggcagcgaaggccggctgatgacacgactgctcacggcgctggccggaagccttgcctttggggcagtgggtcttgcagaggatcttgcccggatgcgcagcccggcggcgctggggctgcggcgggacgtccgccttttgctggaggcactggccgcggcattcgttcttttgctgctgcgggcagcgggctgtctgccccggggactgggcgtgcccggggcggggtatgtgctgctgggcagcgccgtgccctttttgtgggcggtgctcatggtggcgctggctgagtgtgcccgcatcgccgagcgggacgagggtacggtgtgcggcgcggcctttgtggctatgctggcgctgatgatggcagaggccggcttgggcgtgcccgggctggcggtgctgcccgccgcgcttgccggggcactggtggcactgctgctgtgggcgttccccccggcaaggctgggggtgggctgctgcggcagcctgctggcggcgggtgccatcggctgcatcccgctcagtctggatatgaccagcctgactgtgccgctggcgctgcccttctgggcggcaggcggtcttttggcagcgcagctgctgggtgcaaaacgcaccggcaagcccttgcgctgctgggtaaaaaagcataaaatgagcccggagacggtgttcctgtgcagctttgcgctgagcgctgtcggctatgtactggcgctggcgctgctgcgctggtgctgaccgggcacagagagggaagggagcgcagatggcgactaaccgcaaaaaacacagagcgccggtgccggtgttccagcgagacccgggcccgtggtcccggctgctgatcgactggctggccacgctggctgttattatgatctttgggttggtgatgctgttcagcgccagctacaccaccggttacctgcgcatgggcgacagcttccactacatcaagcagcaggcgctgtgcatgatactggggctgggctgtatgttcctgataagctatgtggatcaccgttttctgcgcaagatggtggtgccggggtacttcatcgtgctggccatgctggccgtcaccctgaccatggcacccctgaacggctgccgccgctggatccgctttgcaggccttacgttgcaatcctcggaggtggcaaagtttgagatgatcctgttcagttcccatcttgcagccaaggcaccgcaggtggagcggctggacccggagcgccgcatcctgcttaccccccgggagtggctgcgggtgcgggtatggaagcagctggtggtgccggtgctgccccttataccggtggtcctcctgctggcgatggagccgcacatgtccggcatcgtgctgacggtggcggtggtgggcaccatcctgctgctgtccggcagcggcggtgtgctgacatgggcgggtgccatcacggcgggcaccctgctggagaccctgctctcccatgtggactctatcccctacctgcaaaagcgtctggatggctggacgcaggatctgagccagatgaccgaccagaccgtgcagagcctttatgctatcggctccggcggactgaaggggctggggctgggcaacagcgtggaaaagcagctctggctgccggaaagcaccaacgacttcattttcagcgtggtgtgcgaggagctgggctttattggtgcagtgctcatcatcgtgctgttcgtgctgttcatcgtgcaggggctgctcatcgcctataaggcggaaaatctgtactgcaccatggtaggcatcggcattatggcgcagatcgcgtggcaggtgttctgcaacatcgccgtggtcaccaataccctgcccaacaccggcatcagcctgcccttcttctcctccggcggtaccagcctgatcctactgctggcagagatgggcgtaatggtgaacattggccgcaacggcgagcgggcagcgcagcagcgggagcagatgcgtgcccagcgggaggccgcccgcgccgagcgggaagcagagcttgcccgcaagaccattgatctggcctctgcccgcgcagcccgcacggaagagtaaaataaaccgcaagcccgcccggtctgtagccgggcgtttataaggaggaatcaccatgcgtgttctcatcgcagccggcggcactgccggacatatcaaccccgcactggccattgccggtgctttgaaaaaagccgaccctaccgccgagatccactttgcaggccgtaaggagggcatggagtaccgtttggtaacacaggcgggctaccccttccaccatattgagatcaccggttttcagcgcaagctcagcctgcacaacatcaaacgcaacatcatcaccctgtggaatctggccctctccggccccaaggccaaggccatgatgaaggaagtaaagccggatctcgtcatcggctgtggcggttatgtgtccggcccggtggtgcgctgcgccgccaaaatgggcattcacaccgccctgcatgagcagaacgctttccccggtgtgaccaacaagctgctggccccggatgtggatatcgtgtttgccgccgtgcccgccgccgtggaaaagctgggtgcaccggacaagacccttgtggtgggcaaccccgtgcggccggaggtgtttgcacaggccgccaaccgcgaggccatccgtgcacagctgggtgcgggcgaccgcaccgtcatcctgtccttcggcggcagcttgggcgcacgccgggtcaacgaggtggtggcagacctgtgcgcctgggaacagcatgagcacaagccggtgctgcacctgcacgccaccgggcagtacggggtgcagctgtttgagcagctgcaaaagcagaaggattttgcccccggcgacagccttgtggtaaaggaatacatcaacaatatgccggaactgctggcagcggcagacctcgtcatcagccgcgccggtgcgctgacgctggccgaactggaggctgtgggacgcgccgctgtgctgatccccagccccaacgtggcggagaaccatcagtactacaacgccatggaactgcagaaggccggggcggctgtggtgattgaagaaaaagacctgaccggtgaaaagctggtgcagacggtttctgccatgctggcacagcccggcaagctggccgagatgggcaaaaacgcccgcagcctgtctgtggacgacagtctggaccgcatcactgcggcgctgctcaagctggtaaagaccccgtgatgcagccccggaataaacaggaaagaaggtgcgaatgatgcagcagaaccgtgaccgcaacggcagaccccggaacccaagaccctatgatctgaaccgggatgtggcgcgcacctctgcgccttcgcaggatcatacgccccggagcaccggcagcagccgctacggctacaacggcgagccgctcagccgcccgccctcccgcagcgccaacggcagtgtgcgctcctcccgggcagataacagcatccagttccccacccagtcccagacccgccgcccggcgcaggggcaggggagcaataccacccagtaccccgccggtaaccgcccggcgggcagcagacccaaaaacgcgaagtccggcggcaaacagcgccgcccggcaaacaatgcccgcagcgggcagagcagccggaaaaaccagaacgcgcaaaaccgcccgaaccggcagcacccggcaggcagccagagcgccccgcagcaaagccctgcccggcgggaaatgcgcaaaaagcgcaaggtgacccgcgccacattgcggcgccgccggatactgcgccgcctgaccgcctttgccatgctgctgtgcgtcattggcgcgggcatctacctgaccatgaccatgctgttccgcatcaactccattcaggtgcagaccccggacggcaagcaggtgaccgaaatcgctggctactccgcagacagcattttgcagcggatgggcgtgcagctggaggaaaacatcttcagctttgagcccggcgaaaaggccgcggtgctggagcagaacttcccgctgctgggctccatcaaggtgatccgggactaccccaacaccgtggtggtgcaggtgaccgaggccgtgcccgcctacgcggtgcaaaacggcaataaatggcttgtgatctcggacaaatggaagatcctctccgaggaaagcacccagcctgaggggctttgcaccctgtacggcggcaagctgcaggacaccaccccgggacagggcttctggttcgtggaggatgcggacgcggcaagcgcctccgggtcggaaaccgccgaaagtgaaagcacggtgaacaccgagaccgcccgcatggaagcgctgcgcacactgcgcagcaagctggaggaatacggtctgtcgcaggacgtgacacggctggaagtggcagacaccgagcagctcgcatttttgtatcaggaccgcatcagcgtgctgctgggcacgctgaacgatctggattataagctggaccgcgcccgctatgtactgaccaacgccgacggcaagggctgcggccccaccgacaccgggcggctggatttcagccataccagcgccagcagcacccgcaagatctattttgcacagggcgagcccactctgccttccggctatgtggtgccgcccaaggccgaggaacccgccccggccgaggacacggcagacagcaccgacagtgcagaaagcacggatactgccgacaccaccgaaccggcggctgaaacggacaccgagcagctgcccctgacccaccctgaccgcatgacggccaacgaagaagaaaaccccatgtaaagaagctctttggaggagactgtatgaagctggaacaactgatggaaggcgtgccctttacccttgtgcagggcagtctggatactgagatcgcagatatcatctacgacagccgcaaggctgccccggggcttttgttcgtgtgtatcgtgggcacccaacgggacagccacacgtttgccgccgactgcgccgccaagggggtcagcgcgctggtcatccagcacgacgtcgacctttctaccctgcccggagtgaccgtggtcaaggtggagagcagccgctatgccatggcgttgatgagcgccaacctcttcggcaatcctgcccgccagatgaccatgatcggcgtcaccggcaccaagggcaagaccactaccacccacatgatcaaaagcgtgctggaggccgcaggccgcaaggtgggcatgatcggcaccaacggcatctactatatgggacgccacaaggacaccgccaacactaccccggaaagctacgagctgcaaaagactttccgggagtttctggatgccggctgcgataccgcgctgatggaggtatccagtcagggcctgatgatggaccgcgtggcgggcgtgcactacgatgtgggcgtgttcaccaacctttcgccggatcacatcggccccggcgagcacaagacctttgaggagtaccgcagctggaagggacagctgttcaagcgctgcgatgtgggtgtggtgaacattgacgacgagaacaccgccgccctgctggaaggccacacctgcaagctggtcacctatggccgcgatgaaaaggccgactaccgcgagaccggctacaaactgctgcgcacccacgattttctgggcgttgccttccacgttaccggcaaggacgagatggacgtcaaggtgaatatgcccggcgagttcagcgtgtacaacgcgctggcagcgctggccgtgggcaaggtgctgggtctgccggatgccgccatccacgatggtctgggcaagtgcgtggtgaagggccgtgtggagctggtgcccatcagcaaaaagttcaccatcctgctggattacgcccacaacgaggtatccaccgagagcctgcttaccaccctgcgcgcctacaagccccaccgtctggtggtggtgtttggctgcggcggcaaccgctccaagctgcgccgctacggcatgggcgagatctgcgccaagatggccgatttctccatcctcaccgaggacaacaaccgctttgaaaaggtagaggatattattgcggatatccgcgagggcatgaacaagggcaacccggacgcaaagttcgtggagatccccgaccgtctggacgcgctgcactacgcagtggatcacgcacaggagggcgacctgattgccgtcatcggcaagggtcacgagacctaccgcgaccgcgagggcgtcaagacccccttccttgagcgggaactgctggaagaatacgcccagcagatcggactggaataagaaatattattattgcgggaaaagccgctgcacaaagtactgtgcagcggcttttttgcgtctgtgggagcccctatataaagaggaagcaaactgtgacagaaatgtaaaagataaaaatatttaactaaaaccattgacttatccaacggtttgattataatggtcgtgttcgatacctcataaattttaggtaaataattaaaaacaaacagtgaacataaaggagaatactaccatgactttcgaggaaatgaagaagatcgttgtcgataccctgagctgcgatgaggacaaggtgaccatggaagccagcctgaccgaggatctggaggccgacagcctggacgctgtggagctgaacatggcactggaagaggcctgcggcgtgtccatccccgatgaggagctggcatccctcaagaccgtgggcgatatcttcaactacatcaatgcccatgtctgaggctgaccgaggcgaaacgagatgaacagtatcaaagacctgctgccgggcagcatgcgggagcgcaccttccagctgaaggcccggcgggatgcgggtgccgtgtggaacgacccgcagttcgtggaatgcaaaaagtgcggacgccgcgccacccgccagatctggaacaaggcgcagtacgtctgtcccaactgcggggtacacctgcccatcggcgggtactaccgcctgagcctcgtccttgacaagggcagcttccgggaactggacgccgaccttgccccgcaggatgtgctgcagtttcccggctacccggaaaagctggaagcacagaccggcaagaccggcctgaaggaggctgtcatcaccgccacggggcgcatcgagggcaccccggtggtagttgcagtgctggacagccggttctttatgggcagcatgagcaccaccgtgggcgaaaagatcacccgcgccgtggagcacgccaccgcaaagcacctgccgctgatcatcttctcggccagcggcggcgcccggatgcaggagggcattttcagcctgatgcagatggcaaagacctctgccgccatcgagcggttctccgcccggggcgggttgtacatcagcgtgctgacccaccccaccaccggcggcgtgactgccagctttgccagccttggcgatattatgctggccgagcccggggcgctgatcggttttgcggggccccgggtcattgaacagaccatcggcgaaaagctgcccgcaggcttccagcgcagcgagttccagtacgagcacggctttgtggacaaggtagtgccccgtaccgaaatgcgcgaaacactggcgcagctgctgcgtctgcacgcctgaggagggagcgccttatgatcaaggacatcttacaacagctcgcaccgctggatgaaaagatcgccgccctgcgcggcgacccggcggacgagaacatgaccgatatcaccaaccacgctgccgaactggcagagctttccgcgcaggaggacgctttgctgtccggctgcggggcactgaccgcagaggacagagtttttctggcacgccacccggagcgcccccacatcgacgagatcgtggatgcactgttcaccgacttctttgagcagtgcggcgaccgccagtgcaaggaagatgccgctattctgggcggtgtggcgctgttccacggccagccggtcacggtcatcggccaccgcaagggcagcacgctggaggaaaatctgcgctgcaacttcggtatgcccgggccggagggctaccgcaaggccctgcgcctgatgaagcaggccgaaaaatttgaccgtcccatcattaccttcatcgacaccccgggcgcataccccggcaaggacgccgaggagcgcggacagggcgaagccattgcccgcaacctgatggagatgagcggcctgaccgtgccggtgatcgcagtggtcaccggcgagggctcctccggcggcgcactggcgctgggtgtggcaaaccgcatcctcatgctggaaaatgccgtctactcggtgctcagccccgaaggctttgccagtatcctgtggaaggattcctcccgcagcggcgaagcctgcgagatcatgaagctgaccgcacaggatctgtacaaggacggcatcgtggaggagatcatcccggagccggtgggcggcgcacagcgcgcccacggggtactgttcggcaatctggacgaggcactgcagcgtcagctgcgcagccttgcccgcatgaacggccgtcagctggccgagcagcgctaccagaaattccgtcagatcggagaaatgaggaaagcatgaagggtttgcgtctgatcgccaccggcggggctttgcccggccgcacggtcaccaacgaagagctgagccgcaccgtggataccagcgacgagtggatcaccacccgcaccggcatccgtacccggcactactgcaccgagggcgaaaatgccgctacactggccattgctgccgcaaagcaggcgctgcagcgcagcggtcttgctccggcagacattgcctgctgcgtctgcgccaccctttccgcaccggacgccaccccaagcgtggcctgtcaggtgcaggcggcgctggcactgccggaaaaccgccccgcactggatgtaaacgccgcctgttccggctttttgtacggcacggcggtggcgcgcggcctgctggctacgctgggcgggcggtacgcgctggttatcggcacggaagcactctcccgcctgatggaccccgccgaccgctccacctgtgtgctgttcggcgatggtgccggtgcagcggtgtttgaactgaccgacacctctgcgccctttgccatcacgctgggtgcccggggcgatgccgccatccatgccggtggccccagccgcgcaggctcggcacccatcagcatggacggcagggcagtgttccgctttgcggtggatgccctgcccaaatgcctgcacaccgtgctggacgagaccggccttacgctggacaatctggactgggtggtctgccatcaggccaacagccgcatcatcgaccactgcgtcaaggcgctgcacgccgacggtgcaaagttctacaaaaacatggaccgccacggcaacaccagtgctgccagcatcccggtggcgctgaacgagctggccgaaagcggccagctgcaccccggacagacccttgcctgcatcggcttcggcggcggcctgacatggggcggcatgatcgtggagtataaaggataaagaccatgaaacttttaaacgagatcctggggacgaaataccccatcattcagggcggcatggccaacattgccaccggcgagtttgccgccgcctgctccaacgccggtgcactgggcatcatcggtgcgggcggcatgaatgccgataccctgcgccagaacatccgccgctgccgagagctgaccgacaagccctttggtgtaaacatcatgctcatgcacccgcaggcagatgcgtttgcccagatcgtggtggaggaaaaagtcgccgtggtcaccaccggcgcaggcaacccgggaaaatacgtttccatgtggaaagctgccggcatcaaggtgattccggtggtggctgctgccgtgctggcacggcatttggagccgctgggcattgacgccgtcattgccgagggcaccgagagcggcggccatgtgggcgagatgaccaccatggcactggtgccgcaggtggtggacgcggtcagcgtgccggtcatcgccgcaggcggcattgccgatggccgtcagctggcggctgcgctggcgctgggcgcctgcggggtgcaggtgggcacctgcctgctggcaagcgaggagtgccccattcaccccaactacaaggccgcgctgctcaaagccggggacagtgacaccatcgtcaccggacgcaccgtgggtgcaccggtgcgtgtgctgaaaaaccgcatgagccgggagtatgtccgtcaggaaaaggcgggcgccgataagatggagctggaaaaatacacgctgggcagcctgcgccgtgccgtctttgagggcgacacggtaagcggcagcctgatggccggtcaggtagccggaatgctgcacgaggtgcgccccgtggcggacatccttgccgacctgtggcagggcgggaggcagcgcatcgccgcgctgaacaccgaatgctgacccttggcggcaagcccctgcaagtacccattttgcagggcggcatgggcgtgggcgtctcgctgggcgggctggcaggtgcggtagcagcctgcggcggcatggggtgcatctccaccgctgatgcaggctaccgcgagccggattttgcccgtgacccggcggcagccaaccaccgcgctctgaccgcagaaattcaaaaagccaaggctattgccgggggcatgggtctggtagccatcaacgcgatggtagccacccgggactatgtcgaggctatccgcaccgccgtggcggcgggagtggatgccgtggtctccggtgcgggtctgccgctggaactgccgggcatcgtgggcaccaaagaggtggccattgcaccaatcgtgtccagcgcccgggcggcaaagctcatcctgcgccgctgggcaaagggctttgaccgcaccgccgattttgtggtcattgagggctgcaaggcgggcgggcatctcggctttgccgaggaggacctgctggccgaccgctgccaaaccttggatgaaattttacccggggtgttggccgaggtgaagccatacgaggagcaatacggccacgctatcccggtatttgtggcgggcggcgtgtacaccggtgccgacatggcacactttacaaagcttggcgctgcgggcgtgcagctggccacccgcttgatccccacctacgagtgcgacgcctcccagacctacaaggacgtgctgctggcggcaaagccggaggatgtgcgcatcatccacagcccggtgggaatgcccggccgcgcgctgaacaccccgctggtgcaggcgctggccgagggcaaacgcttcccgcccaagcactgcgcccggtgtctcaagacctgcgaccccgccgccgtaccctactgcatcacccacgccctcatcgaggcggtgaagggcaacgtggaggaaggacttttcttctgcggtgaaaacgtgggcaggctggatcggatgcgcaccgtgcgcgagctgatggacgaacttgtgaccgaatggaggcagaatttatgaagcttgccgtactttacgccggtcagggtgcgcagcaccccggcatgggcaaggaattttacgaagcatctcccgccttccgggcggcctttgacagcgcagcgctggattttgacctgcaccgcgtctgctttgaggacccggacggcgttttgaatcagaccgaatacacccagccctgcatggtggcctttgcctgcggcgtgaccgctgtgctggccgaaaagggcgtaaagcccgcctatctggcggggctttcgctgggcgaatactccgcgctgcaggcagccggggtgttcaccgcaaagcaggccattgaactgaccgccttccggggcaaggccatggccgaggccgcaaaaggtcttgactgcggcatgaccgccgtgctggggctggacagagaaaaactgtccgcctgctgcgaacaggcggctgcggcgggctgtgtgcagatctgcaactacaactgcccggggcagctggtcatcggcggcgagaaagccgctgtggagcaggctgccgcgctggcaaaggaagccggtgcccgccgctgcatcccgctgaaggtcagcggccccttccacacaaagctgatggctcccgcaggggatgcgctggcacagcgctttgcgggcgaaaacttcggcaccatggagacgccggtgctgttcaactgtctggggcatgaaaaggccgagaccgacagcatcccgcagctgctggtaaagcaggtgcagagcagcgtctacatggaagataccctgcgccgtctgggcgagctgggcgtggaccacattctggaagtcggccccggcaacgccctgagtggttttgtgaaaaagaccctgcccggggtggtctgcaccgcagtggagaccccggaacagctggatgcggtgctgaccgcatggaaggaagcagaatgagcgaagaaaagctgacccgcgccgccattgttaccggcggcagccggggcattggccgcgcagtgtgcgtggcactggcaaagcagggctgcaacgtggtggtgaactactgccacggcgcagagcctgcggggcagacggcagcgctctgccgcgccgagggcgtgcaggcggtgaccgtgcaggcggatgtatccaccgccgagggctgcaaggcgctgttcgatgccgctgccgaggcctttggccgggtggatgtgctggtgaacaacgcgggcatcacccgggacaacctgattttgcgcctgaccgagcaggattttgaagcggtgctggacaccaacctgaaaagcgcctttctctgctgcaaggaggccgcccgccgcatggtgcgccagcgctatggccgcatcgtgaacctttccagcgtggtggcgctgcggggcaacgccgggcagaccaactacgccgccagcaaggcggggcttatcggcctgaccaagagccttgcccgggaactggccgcgcggaacgtgaccgtgaacgcggtagcacccggctttatcgacaccgacatgactgccgtgctgccggaggcggtgcgcaccggcatgacgcagggcatccccgcgggccgcgcaggccagccggaggatgtggcacaggcagtggcgttttttgccgcagaacaaagcagctatctcaccgggcaggtgctctgtgtggacggcggcatggcaatgtaaaggagaacccttatggaaaaacgcagagttgtgatcaccggccttggcacggtgaacccgctgggcaacaatgtggcggacagctgggcggcagcccgtgccggtaaatgcggcatcggccccatcacccagttcgacaccaccgacttcaagtgcaagctggctggtgaggtaaaggattttgaccccgagaccgtggtggacaaaaaggaagtccgcaaaatggcgcgcttcaccctgctggcactgggcgctgccgccgaagccattgcagacagcggccttgataccgaggccgagggcaaggacatcggcgtcatcctgtccagcggcatcggcggtctgcccacgatcgaggagcagcacgcccgcggcgaggaaaagggcatggagaaggtaagcccctactttgtgcccatggccattgccaacatggcggcggcacaggtggccatccgctttggtctgaagggcatgtgcacctgcccggtcacggcctgcgccggcggcaccaacgccgtaggcgacgccttccaccgcatccgggacggctacgagccggtgatggtctgcggcggcgcggaaagctgcatcagccccttgggcatcggcggctttaccagcatgaaggcactttccaccgccaccgacccggatgctgccagcctgccctttgacgcccgccgcggcggctttgtcatgggtgagggcagcggtgtgctggtgctggaagaactggagcacgcaagagcgcgcggcgcacacatctatgccgaggtggtgggctacggtgccaactgcgatgcctatcactttactgctccggctcccggcggcgcaggtgccatcgactgcatgaagctgaccttggtggatgccgacatcgcaccggagcaggtggatcacatcaacgcccacggcaccggcacccacatgaacgatgcctgcgagactgccgccatccacgccgtgttcggcgcacacgccaaggagatgaccgtggtcagcaccaagagcatgaccggccatctgctgggcggcgcgggcggcatcgaggccgtgtttaccgcgctggcgctgcgggaccagttcgccccgcccaccatccactacgcccagcccgacccggagtgcgatctggactatgtgcccaacaccgggcggcagcaggaaatgcagtacgcgctgagcaacagcttgggctttggcggccacaacgcctgcatcgccttgcgcagatgggagggctgacccatggcagaaccccgtaccgtgcgtgaaaacgccaacaccctgagcagcgtgcagattgcagaaattctgccccaccgctacccctttgccctcgtggaccgtgttctggactacgagccggggcagtgggccatcggccgcaagtgcgtcacccgcaacgaggaattcttcaacggccacttcccggcgcagccggtcatgcccggcgtgctgctgctggaagcattggcacagaccggcgctgtggcagcgctgagcctgccggaaaacaagggcaagctggcactgttcggcggcatcaagagtgcccgcttccgcaagcaggtcacccccggggacgtgctcaccctccactgcgagctggtacagcagcacggcgctgtgggcgtaggcaaggcctcggcatgggtggacggcaagtgcgccgtcaccgcagagctgacctttgtgctgaccgacgcagcagaataaaatgaatgaaaaagagataggcgatccctttcgggaaagcctatctcttttttgtgtctgttccggtcggtttactctgcggcagctgtcccggcgtctgcttcagcagtgggggcagactctgccgtggcggtttctgttggggcggtcgctgcctgttccttctccatccactcccgcacgcggtcggggcggttggtgatgtaggcatcggcgctggtgcgcagcaggctgcggacggaatcttccgtgtccaccgtccacaaagacaccttgatgcccatctcgtgcagtttgtcaatgaaaccggcgtttttgtaggcggtgtggtactcacagctgacccactccggcacaaagtccagactgctgatataggcgggcagatcccgttgcgacaacaggtttttatagatctcgttcaggctctcgccgggaaagtttgcccgcagcatacttaccttatcgctcatccagcgggtcatccagctgcaattttcctcgtctgctgcgctctccggcagggcagcgtccatggcatccatgtcgtctatgccgttggtcagtcccagatccttccagatgatgggcggcggcagcagcatgctttccagctcgccgtataccagtgcacctacccgcagttcgggcagcagctgctttgcctgccgcagcagcgcgtggttgaaggaaacaaggatcacctgttctaccatcttggtctgctgcagcacttccagcacccggggcacaaagtccgggtcgttgtccatggtggatttcagttccagatgcacggtgcatcccggcatctgcctgcacagttccatggcctcctgcagggtggcgatcttctcgtcctgaaagatggcgcctttccagctgccaaaatccagttcctttaaatcgcccatggtcatatcgtagatcttgccggaaatatccgtgtgcagatcgatcatatagtcgtggtggatcacaagcccggcgtcaatggtctgctgtacgtccatctctacgccgtccgcgccaatctccatggcttttttaaaggcagtcagggtgttttccggtgcaagataggaagcaccgcggtgtgcaatgatttgtggtgtcataaattttctccgttatcggttcttcctcacacgtttacgccccggcgctgccataccgcaaacagtgccggggcgcttgctcaggtcaggtcctcgccgtctgaagcgatgacctttttataccagtaaaaactgtccttccggctgcgggcaagggtgccgttgccgtcgttgtccttgtccacatagataaagccgtaccgctttttcatctcgccggtggaggcgctcacaaggtcgatgggaccccatgtggtgtagcccatcagcggcagaccatcctcattgacggccttttccatctcctcgatgtgcgcccgcaggtagtcgatgcggtagctgtcgtggatggagccgtccggctctacggtatccaccgcacccagaccgttctccacgatgaacataggcttttcgtaccggtcgtaaatggtgttcagggtcacccgcagacccaccgggtcgatggcccagccccactcgctgactttcaggtaggggttcttcaccgatgcagacacggcgttgccttccgcattctctgccgccatcagctccttatccaccgtgatgcagcggctggaatagtagctgaaggatacaaaatccaccgtgccctcccgcagcgtgcggtcgtcctcgggctgtgtgtgcagctgcaccccggcgcgctccatccgctttttagcccacacggggtaagcgccgcgcacctgtacgtcagtaaagaagtagttgtcccggtctgcctcctgcgccgcccgcacatcctccggggcgcaggtgcgggggtagaactgacccgccgccagcatacagcccaccatagcgtccggcattttttcgtgcgccagctttaccgcctttgcgctggccaccagctcgtgatgggcggcctgatacttgacctgctccacattctcgccggggtggaataccagcccggcgccggtaaaggacaggtgcagcagcatgttgatttcattaaaggtgagccagtacttcaccttgcccttgaagcggtcgaacagcacctcgcagtagtggacataggcgtccaccatgcggcggtctttccagccgccgtattttttgatgagggcaatgggagtgtcaaagtggcagatggtgaccagcggctcaatgccgtacttatggcactcgtcaaaaatgctgtcgtagaaggccagtcctgcctcgttgggctgagcatcgtcgccgttgggcaggatgcgggtccatgcaatggacagccggaagcacttgaagcccatctctgcaaacagggcgatatcctctttataatggtgatacaggtcaatggcctcgtggctggggtagaaatgtgcgtcatcgcagcccagcatttccatatagcccgttgccaccggaaaacggtccgggccgaagggggtcacgtccaccgttgccagacccttgccgtctgcctgccatgcaccctcgcactggttggcggcggtagcgccgccccacaaaaagcccttgggaaatttgcccatactctttacctccttgtttacttttgcgcccctgcggagcgcagatatacgcatactactatgataccgcaaccggcggcgcttgtccatgactgcattttgcaaaggtgcgtgcatttggggataaagtacgacttttatcgtcaaaacgccgaaatttcctactgttttttgcgcacttttcacgataaaaacacaaaacttgcctgtttttcttttattctgttccttttaaaccgcgcggcagtatggtagaataatagggtaagaactgcgctgcgctgctgcgctgctgagaacatggaaaaatggagtgtttgattatgactgagttcaaacccatcaaagaaggcaaagtccgcgagatctacgacaatggcgacagcctgatcatggttgccaccgaccgcatttctgcgtttgacgtcatcctgaaaaacaaggtcaccaaaaagggcaccgtgctcacccagatgagcaagttctggttcgattacacccgcgatctgctgcccaaccacatgttgagcgtggatgtgcaggatatgccggagttcttccgccagccccagttcaccggcaacagcatgatgtgccgcaagctgaccatgctgcccatcgagtgcatcgtgcgcggctacattaccggcagcggctgggcaagctaccagaagactggcaaggtgtgcggcatccagctgcccgagggcctgcaggagtccgataagctgcccgagcccatctacaccccctccaccaaggcagagatcggcgaccacgacgagaacatctcctacgagcagagcatcgacgtgctggagaagcagttccccggccacggtctggagtacgccactaagctgcgcgactacaccattgccctgtacaagaagtgcgctgagtatgcactgtcccgcggcatcatcattgccgataccaagttcgagtttggtctggacgaggacggcaacgtggtgctgggcgacgagatgctgaccccggactcctcccgcttctggccgctggagggctacgagccgggtcacagccagccctccttcgacaagcagttcgtccgcgactggctgaaggccaaccccgacagcaactacgacctgccgcaggatgtcattgacaagaccattgccaagtatctggaggcctatgagctgctgaccggcaaaaagctgtaagcgtatcccgtatccataaaaaccaaggctgctgcggaaaattttccgcagcggccttttttgcgccccgccccttgacattgagtggggatgtgagtaatatatgtatcgtatcaaacagtttcacatcgaacaacttgaatagaggaaaccattatgtgtacacagcaccctattgaagagccctgcaagctggacccgccgtgggaagggccgcaggtcatccctgcccagctgcaccgggtggataacctgatcttccgcaggctgaaccagttttcccgcgccaacggggtagagcagaccacccccatgcacgggtggatcatcgagtatctctaccgccaccgggacgagccggtgttccagcgggacatcgagcgggaattttccatcacccgctccacggtgacgaacattttgcagctgatggagcgcaagggctacatccagcggctgagcgtgccgcaggacgcccggctcaagcagctggttttgaccgaggagggcatccaacggcacgaaaagaccctgctttccttccaccagaccgacgattatgtggccggactgctgaccgaggaggagaacgcagaactgctgcggctgctgaacaagctgcgggaagcactgaaataacgatcttttccgtcaaagcgccgaaaaaggacttgttaaattagcaattatgaacatttttcgaaagctattgacatttaaattgttttgtataaaattgttttgtaccaaacaaataaaattaacaggagggaactcagatgatcaaaaagcttgtgtcgcatctgggcgagtataaagccgcctcgatcaagacaccgctctttgctgcgctggaagccattatggatgtgctgctgcccaccatcatggcctttatcatcgaccagggcattgaaaagggcgatatgaacgccatcatccgctacggcctgcttacctttctggtggcagccattgcgctggtgctgggcgtgctggcgggcaagtatgccgccgaggcatccaccggctttgccggaaatctgcgcgatgccatgtatgaaaacatccagcattattctttttccaacatcgacaaattctctacggcaggtcttgttacccgtatgactaccgacgtgaccaacgtgcagaacgccttccagatgattttgcgcatgtgcgtgcgcgccccggtgcatctggtgtttgcaatgttcatggccgtggtcatcggtggcccgttgtcgctggtgttcgtggtggcggtggcctttctggtggcagtgctggctgccatcatgatccctactttccacatctttgaccgtgtgttcaagaactacgataacctcaacgcctcggtgcaggagaatgtctctgccatccgcgtggtcaagagctttgtgcgcgagggctttgaaaacgaaaaatacaccgctgcctgcgagagcctgtataagcagttcgtcaacgcagaaagccgcctgagcttcaataaccccgccatgctggtggcggtgtacggctgcaacatcgcgctgagctggttcggcgcaaaatatgtgctgcacggtgccattaccaccggccagctgaacgccctgttcggctatatcatgaacatcctcatggcactgatgatgctgagcacggcctttgtcatgatcgccatgtccgccgcctctgccaagcgtatcgtggaggtgctggacgagcacaccgacctgcccccggcaaagcagccggtgcagcaggtggcagacggcagcatccagttcgaccacgttaccttcaagtataaacacggcagcggtcagccggtgctgaacgatatcagctttaccatccaacccggcgagacgctgggcatcatcggcggcaccggcagtgcaaagtccagtctggtgcagctgatcccccgcctgtacgatgccgagagcggcaccgtgcgggtaggcggcgtggatgtgcgggattataaccttgatgttctgcgccgcgaggtctccatggtgctgcagaagaatgtgctgttcagcggtactattctggataacctccgctggggcgatgccaacgccaccgaggaagagtgcatccgcatggcaaaactggcctgcgcggatgagttcatccagcgcttcccggataagtacaatacatggatcgagcagggcggctccaacgtgtccggcggccagaagcagcgcctgaccatcgcccgcgccctgctgcgcaagcccaaagtgctgattttggacgactccaccagtgccgtggataccgcgaccgatgccaagatccgcaaggccttccgggaggagatccccggcacgaccaagatcatcattgcacagcgtatttcctcggtgcaggatgcagaccgcattctggtgctggagaacggccagatcaacggtctgggcacccacgcagagctgctggcgaccaacgccatctatcaggaggtctacaacagccagacgcagggcggcggcgattttgacaagcagggaggtgcgcagtaatggcagtaaaagaagtacatggccccggcccgcggggtgcacgggggccgcgccccaaggtggaaaacccgggcaagctgctgaagcgcattatggatgaggtgttccgcaactatctgccccactgcatccttgtgcttgtctgcatcgtggtcagcgcgctggccaatgtgcaggccagcctgttcttgcagaccttgatggacgattacatcgtccccatgacccgccagcagaaccccagctttgcaccgctggccggtgcattggtgcggatgtgctgcatctaccttgtgggcattctggctgcatgggccaacgcccgcatcatggtcaacgtaacgcagggcacgctgcgcaatctgcgcaccaagctgttcacccacatggaaagcctgcccatccggtattttgacacccatccccacggcgatatcatgtccgtgtacaccaacgatgtggataccctgcgccagatgctcagccagagcatcccgcagctggtgtccagcgtcatcacgattgtgtcggtgttcttcagtatgtgcatgctcagctggcagctgaccatcgttaccatgctcatggtggcgctgatgctgttctgctccaagcagatcgcaaaaagctcctccaagtacttcatccagcagcagcgggatctgggcaaggtgaacggctacatcgaggagatgatggagggccagaaggtggtcaaggtgttcacccacgagcagcagacccttgccggcttccgtgagttaaacgaccagctgaaggaaagcgccaaacaggccaacgccttctccaacatcatgatgccggtcaacgcccagctgggcaacatcagctacgccatctgcgcgctgactggtgcagccatggccgttggcggcgttggcagcatgacccttggcaccgtggtggccttcctcagcctgaacaagggcttcaatatgcccatcagtcaggtgtccatgcaggccaacagcgtcatcatggcactggccggtgcagagcgcatcttcaagatgatggacgagcccagcgagaccgacgagggctatgtgacgctggtaaatgccaagtacgaccgcaacgaccagctggtggaaactgccgagcgcaccggtctgtgggcgtggaagcacccccaccacgacggcactactacctaccacaagctggcgggcgatatcacctttacggacgtggactttggctatgtgccggaaaagacggtgctgcatgacatcaacctgtatggccgtccggggcagaagatcgcctttgtcggctccaccggtgcaggcaagactaccattaccaacctgatcaaccgcttctacgatattcaggatggcaagattcgctatgacggcatcaacatccacaagatcaaaaaggccgatctgcgccgctcgctgggcatcgtgctgcaggacacccatctgtttaccggcacggtgatggagaacatccgctacggacggctggaggccaccgatgaagagtgcatcgccgccgcccgtctggccaacgccgatggctttatcaagcgcctgccggagggctacaacaccatgctgaccggtgatggcgccaacctctcgcagggacagcgccagctgctggccattgcccgcgcagccgtggcagacccgccggtgctgatcctggacgaggcgacctcctccatcgatacccgcaccgaggcgctggtgcagcgcggcatggacggcctgatgtacggccgcaccagctttgtcatcgcgcaccgcctgtccaccgtccgcaatgcagactgcatcgtggtgctggaacagggccgcatcatcgagcgcggcagccacgacgagctgatcgccaaaaagggcaagtattaccagctttataccggtaatctggccgagaactaaacaatttcccaccttctcacaaagccgccgcacagccatgccgccgtgcggcggctcttttttattcccatgaagaagcaattctggaaaatccgcagattttccagaattgcaaatataaaaataattttccgctgaagatagccaaagcgcacgcggcggccatttaaaatcgtccgctccacggtatacaaatgccccgggctgtgctagaatggagcaaacgagaaaaaggctggtgagtgtatgcaccctctgacggaatatccccgcccgactatgcgccgggacagctacgagaacttgaacggcctgtggcagtacgccatcactgcctcggcacagcgcccggcgggctgggatggcgagatcctggtgccctacgcgccggagtgccgcacctccggggtggggcgcatattgcagcccgggcagtggctgcactaccaccggtactttgcgccgcccgccgggacgggcggacgggtgctgctgcatttcggtgcagtggactacgcctgcgccgtgcaggtgaacggccatctggtaggcggccaccggggcggctactggccctttacgctggatatcaccgcgcagctcaacggcacaggccgcaacagcctgtgggtggcggtgcaggaccccaccggccacggcacacaggcgcggggcaagcagactttgcagcccggcgggatgttctaccccgcgcagagcggcatctggcagacggtctggctggagcgcgtgccggaaaattacatccagtctctcactgttacgccggactacgatgcccgcaccgtgaccgtgaaagcccatacctctgcacccggcggcgcggcgaacctgtgggcggtggtgcgcgccgggggcgtgaccattgccgaggactggggcggtgatgaggctgaccaggacggtgaggtgacgctgcatattgcgaaggagcatttcttcccgtggagcccggacacgccctttttgtacgacctgaccgtgggcactacgcagggagaggaagagcagttcgacaccgtgcacagctactttgccctgcgcaagtggagctgcgcatcggacgaaaagggcgtgctgcgcttctgcctgaacgagaagcccatcctgctcaacggtctgctggatcagggctactggccggagggactgtacaccccgccctcggatgcggcggtggagcgggaactgagcgaggtaaaggcgctgggctacaacctgctgcgcaagcacgcaaagatagagccgcagcgctggtactaccactgcgacaggctggggcttgtagtctggcaggatatggtcaacggcggcagtaagtataacctgtggttcgtcacctacctgaccaatgttttgcagccgcttatgcgccgcctgccggacaaggcggcgctgtgggggctgctgagccggggcagcgaaagcagccgggaagaataccgccgggagctggaagatacggtacaggcgctgcgctgccacccctgcgtgggctgctgggtgccctttaacgagggctggggacagtacgatgctgccggggcagtgcaggccatccgcgcgctggacgatacccgtcttgtggacgaggccagcggctggtacgatcagggcggcggggatgtgtactccctgcacaactacttctaccccctgcgggtgcgcccgcagacccgcaccgtggcgctgagcgaatacggcggcattgcatggcctatgccggggcacgagccgccccgcaagacctacggctacggcacagccaaaagccgggaggagctgaccgcccgctacaaaaaaatgcagctgggcacggtgctgccgcagctgcaaaaggggctttcggcgctggtatacacccagctgaccgacgtggaggacgaggtgaacggcctgtttacctacgaccgcaccgccatcaagccggacgccaacgccgtccgttcggtgaacgccgcccttgccgcagagtttgcaagggtggtaaaataaagcgcctttggcgcgttctgcggagcgctccaaacgcattttcacaaaaggagctgttgcaggaaatgccgtctgccgttgcaatccctcccgtgagaaggcaattctggaaaatccgcagattttccagaattgcaaatataaaaatatattttccgctgaagatggctagagcgcacgcggaggccatttgaaatcgtgctcaccccggtatacaaacgccccgggctgtggtcgcattaccactggtactttgcaccgccgtccgggatggacggtggtttttggtaggatgattttcgtcatttttgacaaaccccgacagcctggcttagagccttctccaaagattttgacacattcttgacagcacttttttgatatattaatatattagtgacagctctcatcttatatggtgaggaagtttcgtacagtattcacaatccgtatttattttttggccccaaaaggagaagaaactatggaactgagcagacgtgattttatgcgtaacactgctgcctttgcggctgttgccagtgtgctgggtaccagcggcattgcctttgcagcggacgccgaccagaattgtctggtcaaggtggacagccccgaccgggcagagctggccaagcgttttaaggcgggcagtgctgccggggtggagtactacgcctacaatccccgccgttacgccccgaccctaaaggggcgcctgcccctgatcgttttcctccacggcgaggacggcgtaggtcccaacggcacccagcttaccgccaacgacggtgctaccttctacatttctgacgaaatgatccggaagaaccccacctacctgtttgcaccccagtgccccggcaagaactggaccgacccggacaccgttacggccctgaagtctgccatcgacagctatgtggctgcccaccgcattgacccggaccgcatttacatcgagggtatgtccatgggcggcaccggtgtctggaacatgatcctgagctacccctactactttgccgcagccatccccatgtgcggcatggtgcctgcccagtggtacaccgtccccggtgcctttgaggccatcaagaacacccctgtgtgggcctaccactgcaaggatgacccggagatgccggaggccgagactgccaaggctgtgcaggccctgaaggatgccggctgctcctgcgtgaagtacgagggctttaccgccggttccatgccggagccccacaaggtatgggagcgtgtgtacagcatcggcactccctataactggatgtttacccagtccctgacccggacccagcacggcaagctgaaccccaacatgatgttcagccactacccggtgaagtacaacatcacccgtgtcatggactttggcatggacaccctgtgggtaatggatctgggcaaggaagccctgatcattgacaccgccatgggcggctccggcgcagcagacctctacgcctacctgcgggagaacgtgctgaccaaccctgacgcagagctggatatcctgctgacccacaagcacggcgaccacattctgggcattccctccctgctgaagtccggcaaggtccgccgcacctacatccaccccgatgaccaggagggcctgctctccagcatgcagaagttcttcggcctcaccgccgaggacctgaagctggtgaacatcgtggacggcgacacggtccgcatcggctctgaggagctggaagtggtggatgtgccgggccacaccaagggctctgtggtgttcttctacaaggactacatctttaccggtgacgctgttggctccggcgatctgttcatgatggaggctgccaccgacacctatctgccgggtctggagcacttcatggcagaggtgctgctgcggaacgaggatgtggactatgagctgctgacgggccactgggagaacctgaaccccttcagcgtggagtacctccgccacatgctgatcctggtcaagggcgtcatccggggcgatatccccatcggctactacacccgtaagcccggccgctgggcaggctatctggacgccaacatcttctacccctacgctgtcttcagctatgagaacgagaagtaaggcctgacagtgctgtgtccctgccccactgctccaatcaaaaacagacccggcaagcccaaaaggcctgccgggtctgttttatagcgctataaaaaacggggtcaggaaaaatctcgaacccgtttttgcaatttttatgcagttatcagctgttggcgctggtggcgtttacgatcttggaagcgggcagcttgctcatggcagagctgctcagggtgctgtccagctgggcaccgtaggcggcaagggcatcgttcagctcctcgcccttcatgtcgctcaaaatctggctgcgcagagcatccagcgtggaaacactcagcggatccagacggacggccagcattatggcgtagccggtgtactggatggcggctgcctgcccgtaggcaaggccgcgcagggtatcggctgcaccctcctgcgtaaaggcgtcggtcaggtcgctttcgcccagcaggtcggtctgcagggtgctggtggagggtacctcggcgtccagcacggcgcagatatcggtcagtgcgctgcttgcgatgctgttaaaggcggccagctggctggaggtatcctccggggcggcggcgttgtagctgtccgcagccttctgggcaagggagagcatctcggccttctggtcatcgctggcaaaggcgaaggtgctggtgttgtacaggggcacggtgataaagccgatctcgtacatggtgctgtccagatgctcggtcagctcgccgtcctccacaggggtctcgccgtccttgccgtagaccagatccagcagcagggtctgcttgtattgcagctgctggaacagcttcaaagtctccagcccgatgccgttggcagtgtaggcatcgccgtagttgtccatcagctgctgggcgtagctgtcggcggcagacttctgctcctcggtcagctcaccgcccagttcagtaaagcgggcgtccacagcggcaagggtctgcaaagtctcaagggtcttttgcgccacatagtcctttaccacggcggtctcgccggtgtcggcatcggtggtgatggtggccttgaggaaggaattcaccttgctggtgtcctgctcagagtccgccagctgtgcagcctgctggtaggcatcgtactgcgccagcaggtacaggccgctggtcacctcaaaatcgccgatcttgcccacggtgtccggggtggagagtgcacagcccacaaggctgacggtcagtgcaagtgcgcataccagcgcaagcagtttctttttcatgcgttttgctccttatttgtttttataaaaccctctcagtcacgcttgcgcgtgccagctccccctgtttggggagctttttcgcgttcggtgccggtcaggatatctgccatagctttcaggatgttttgcagcagttccagcggcttttcgtccggctgtaataccaccgagagatagggctttgtgcccgccccggcggtgacacggccattgaaagcttgcagcagaccgcggatcatggcaaggtccagcgtttccagattcagcacgagcgtatccttcttctgggtcacctcgtacacgcctacggcagcggcctgtacgcggacaagggaaacgttgaccagatcgctcaccgagggcggcgggtcgccgtagcggtcgatgagctcgtccagcacatcggcggcgtcctccggggtctggatggcggcaatgcgcttgtaggcctcgatgcggcccgcgccgtccgggatatacttttccgggatgaaggcgtccacccgcaggtccacaagacaatcgctcttgtcccgctggacgggctcgccccgcgcccgggcaatggcctgtcccagcattttaacgtagaggtcgtagcccacggcttccatgtggccgtgctggctgtgccccagcagactgcccgcgccgcggatctgcagatctcgcatggcgatgcggaagccggagccaaaagcggtgaactcccggatggcagaaagtcgcttctgggcgatatcggtcagggtcttgtcccggcggaaggtgaagtaggcgtaggccttgcggccggagcgccccacccgcccacggatctggtacagctgcgccagacccatgcggtcggcgtcctcaatgatgagggtgttgcagttgcgcacatcgatgccggtctcaatgagggtggtgcagaccagaatgtcgatctcgccgttcagcaggtgctgccatacggggttcagctcttcctcggtcatcttgccgtgggcgatgcccacccgcgcacccggcaccatctggctgacatgggcggcgcaggcttcaatgttgtccacccggttgtgcaggtagtacacctgcccgccccgggcaagctccttcttcatggcttcggcaaggataacatcgttgtattccagcacaaaggtctccaccggctgccgctcgatgggcggctgctcaatggtggaaagatcccggatgccgctcatggccatgttcaatgtgcgggggatgggggtggccgacagggtgagcatatccaccccgatgaagttttccttcagcttttccttgtgcttcacgccaaagcgctgttcctcatcaatgatgacaaggccgaggtcgtggaacttcacatctttggacagcagccggtgtgtgcccaccacgatatccacgctgccggcctgtaagccgcgcaacgtctccttctgctgcttggcggtgcggaagcgggacagcatcccgatctttaccgggaaggcctccatgcgggagagcagggtgttgtagtgctgccacgccagcagggtggtgggtgccagcagggcgcattgcttgccgcccatgatgcacttgaaggcggcgcgcagcgccacttcggtcttgcccacgcccacatcgccgcagagcagacgatccatggggtaacccttttccatgtcctgcttgatctcggcggtggcgtgcagctggtcgtccgtttcgtcgtagtcaaagcgggtctcaaagtcccgctgccagtcgccgtccggcgggaaggcatagcctgtggcctgacggcggcgggcgtaaagctcaatcaactcctgcgccatctcctcggtggcctttttcaccttggcgcgggtgcgctgccactcggtgccgcccagctttgccagctttaccttttcctcatcgccgggggcggtgtagcggctgagcagatccagctgggtcaccggcacatacagcacatccgagccggaatactgcaccttgaggtagtccttggtagcgccctgcacctccagccgctggataccggcgtacatcccgatgccgtggctctggtgcaccacatagtccccgggcttgatgtctgaaagactggacagggcgtttttgttcttcttgcgctttttggcctcggcggcggcttcctcgtccagcccgtggcggcggctggaaagcaccgccgtgtgggcaaagggaaaggtgcacccggcggtcagatgtccgggcagtacctgtaaaatacccttggcggggcgcacatcccggctcatgctcacggcgtagcccttgtcggcaaggtcacgggtcagagcggctgcgcccttgggcgtaccggcaaacagggtgacggcgtagccttgggcgatgagcgggtctaagtcctcccgcagggaggcaaggtcgccgttccagttgggggcggcaaaggcctcggcgttgatgaggtctttcagtttgaactcgttcatcccgcgcagaaagttctcgcacagcagggcgctgtggttctgggcggcaatgacaagatcgtccatggtctggtacagcacatccagcccggggcagagcacgccctcttccagcagtccggtcagctcctcgctgcggcggaactcagtggccttttgcgcatcccggatgccgccaacttcatccagaatgaacagcggcgcgtccagatggtccagcagcgtggcgggggcggggtagcggatgccgtaatatttatccatggcctccggcatcaggccggaatccagctgggaaagatcggcctcggtggccttttccagcgcggtgcggtgcttgccgcgcgcctttttgatggcgctgcgcagcgcctcggcagtctcggcggtgctgccgaacagcacctcgcgggcgggggagaggtagatcttttccagtgcgccgtcccgccgctgggtcaacaggtcaaaggaggacatggagtcgatctcatcgtcccagtactccacgcgggcgggctgacgcatatccggcgcgtagatatccacgatatcgccgcgcacgctgaactgccccgggccgtccacctgactgcggcgcacatacccggcggcaaacagccgcgccaccagtgcttcgcggttatacaccatgccgggcttcagggtgagggtgttctggatgaattctgcccggggcacggtgtactgcaaaagcgcttcggcgggcacacagacggcttgcaaccgcccgcccgccagtgcgcccagcaccgaaaggcggcggtactcgtactcgcggccggcgccctccaccgggcgcagcataaagtcccggggcgggaacaccgcagcggtaagccccagcgccttgaggtcgtccgcaaagtgggtggcctcggcctcgccgggggtcacgatgcagagcacccggtcaaggtctttttgcagggcggcatacagcagcgcccggcctgcgggcggcagaccgaacagcgccgccggcccggccgagccaaagcttgcggcgaccttctgatattccggggtggccttgagtaaggcttcgtacatggaaaaacctcctttcctgtcaggatgcgggagaataacgattttgaatatcctccgcttatcgggttgcggcacccagcatccgcagcgtgccttgggcggcacttgcgtcttgctggccgctgccccaacaactcctccctgtttccgccactggcggcggtcgtcnnnnnnnnnncgttgcgctctggatattttcagcggaagaattatttataatttcgcgtttggagcgaccgcgtttgcggagcgcagcgtagcaatgaaagccccagtggggcttttaagcggcagagcggtctgcgctagcagatggaggggctttgccccgacaagctctgcggagcgctccaaacgcattttcacgagtgggggcgtgaccgggaacggcagatgctgaggtgagcggattggcgtcccttcggggggagctgtcgccgtcaggcgactgagagggttcgttccgcttacccgttatacttgctctgtgccagactgagcttaccgtccatgataagctttgcagcggcttcaaggtcggcgtagcggtcggcgatggccttggcgtcctccggcgggaatttgcccagcacccatgcggcaaggtcgtagtccgggtggggctttgcgccgatgccgatgcggatgcgggggaagttctctccgcccagccgggcaatgatgcttttcaggccgttatgcccgcctgcagagccggagggacggatgcgcagcttgccgggtgcctgtgtgatatcatcgcacagcaccagcacatggtcggcagggatcttgaaaaagcccgccataggggcgatggaatcgccggagaggttcatgtaggtcaggggtttcagcagcaccaccttgtggccgtccacctcgccctgtccccacagaccttggaatttggtcttgcccacagagatgttccacttatcggccagcgcgtccagcgcggcaaaaccggcgttgtggcgggtgccatcgtactttgcttcggggttgcccagccctgcaatgagccagatatcgttttcattcatgatatgatcataccttttcctgatgatagtgtgatacaacatctaagtataacatacgcgcgcgcaaaaagatatacattataagcaaaaaatgcccccgtgccgcagggcacaggggcaaaagggtttattacaggttcagcgtgatggccgaggccttccagcggccgtcctccttcaccatggtgatggtgccggatacctgcgcggcggcggtgctgtccgtagcggtcagcagggcggcggaaaagtcgtagcagttttctgccccggcgtgctttttcagggtgaggtcagcgggcaccagcttgtcgccggactgcccagccagcgcggtgatgcgggtgggcagacggttcgccatgattttgttcaggcagtcggctgtcgtggcatcgcccagctgcgcctgaaggaaggcgtacaggccatcggtgtccacagcagcaagccccggttcactgccggcgggcgcggcggcgtccacggcctgctccacggcagaggagcaggagagcagctgctgcaccacgaactccgcctgctttttggcggggtcgctgcgcaggcgggtcagggcgaacacggcggcaacagccgcgaagaaaaggacaaggcacagtgcctgcttgcgaaaactttcagacttcatacgtagctcccttccggcagagcgttacttgctctgctcgttttccagtttctgctttttggcgatgtaggcttccatcttgggctctgcccagccgtccagattggtctggcgctcccgggcaatgcccagcgcctgtgcgggcacgtccttggtgatggtgctgccggcggcggtgtaggcaccatcgcccaccttgaccggagccacaaggttggtgttgcagccgatgaagcagtaatcgccgatctgggtgcggaacttatccttgccgtcatagttgcaggtgacggtgccgcagccgaagttgcagtacttgcccacatcgctgtcgccgatgtaggtcaggtggctcacagtgttgccgcgggcaaagttggagttcttggtctccacataggcgcccagatgcacgccgtagtcggtgacggtgttcacccgcacatgggtgaaggggccgatgttgttgtgggggccgatgtggctgccgtagatctggctggcattgacggcggtgccctcgtccacggtgctgtcctcgatgagggtgttagggccgatgacgcagcccgcgccgatgaccgtcttgccccgcaggatggtgcccgcaaggatcacagcacccggggcaatgaccacctccgggtcgatctgcacggtgcggctgtcaatgaccacgccgtttgcaatgtgctgcacaaggatgtcctcgcgggcagcctcggcggcgtccagctgtgccagagctgcggcgcgggcctgttcagaaatggaattctgcatgaaaaaaatctcccttcccaccaaagcgcgcggcggaagagagacaggaaaggcaaccggaaaattgttgcctgtccgcccagcatctccgctgcggaaagctttgttccgacaaaataaaaatgaaaaagttacagggatagaaagttgtatccaacaggacgagaaatcgcgtgtacaaacaaaaaacctctcgaactttctcccattctatactaccttaaaacttagcaaatttcaagggatttgcataaaaaataacagacaaattcgggattttgcatggtggaaaggaatggattttctggtataatagtttagcattcataaaacaatgttcatcgtacgttcaagacaaggcaaacgatgagaccgcggctgccatgccgccggtcacgaatgggaggtaaacaacgcatgagcaaaaagtatctgtattacttcagcgaaggcaatgacgctttcggcggtgacaaggtcaccatgaagaacacgctgggcggcaagggtgccggcctggccgagatgaccgcagccggtatgccggtgccgcagggcttcaccatcactaccgacgcctgcacccagtattacgcagacggccgtcagatcaatgacgaaatcactgctgacatctttgagcacctcaagggcttggagaagatcaccggcaagaagttcggtgacaacaccaaccccctgctggtctccgtccgttccggcgcacgtcagtccatgcccggtatgatggacaccatcctgaacctgggcctgaacgacgaggctgttgagggtctggctaaaaagaccggcaacacccgctttgcatacgactgctaccgccgctttgtgcagatgttcgccgacgtcgttatgatggtcccgaagagcctgttcgaggtcgagatcgacaagatgaaggaagccaagggcgtcaagaacgacgtggacctgactgctgatgacctgaaggaactggtcggcaccttcaagaagatctacgaggagaacgaaggccgtcccttcccgcaggacccccgcgatcagctgatcgaggctgtcaaggccgtgttccgcagctgggataacccccgtgcaaacgtctaccgtaagatgaacgagatcccctacgagtggggcaccgctgtcaacgtgcagcagatggcctttggtaactccggcgaccgttccggcaccggcgttgctttcacccgtgaccccgccaccggcgctaagaagctgatgggcgagtacctgatcaatgcacagggcgaggacgttgttgccggcgtgcgcactccttctcccatcagccacctgaaggatcagatgcctgaggtgtacgatcagttcgttgagatcgctacccgtctggagaactacttccgcgatatgcaggatatggagttcaccattgaggacggccacctgtatatgctgcagacccgtaacggcaagcgtaccgctcaggctgctctgcagatcgcctgcgatctggtggacgagggcatgatcaccgagcaggaggctgtcctgcgcgtggagcccaagcagctggataccctgctgcatccccagttcgacgctgctgccctgaaggctgcagaggtcgtcggcaagggtctggcagcttctcccggttctgcctgcggccagatcgtctttactgctgaagaggcagaggagatggtcaagtccggcaagatgaagaaggtcgttctggtgcgtctggagaccagccccgaggatatcgtgggtatgcaggtctctcagggcatcctgaccgtccgcggcggcatgaccagccacgcagccgttgttgcccgtggtatgggcacctgctgtgtctccggttgcggcaacgacaacgaggtcaagatcgatgaggaggcaaagaccttcgagatcaacggccacaagttcgtcgagggcgactggatctccatcgacggctccaccggcaacatctacggcgagcaggtcgcaaccgtggccgctaccggcaacaagaacttcaaccgcttcatgggctgggcagacgcagcacgtcagctgctggtcatgaccaacgctgataacccgcgtgacgcacagcaggcagtggatctgggcgctgagggcatcggcctgtgccgtaccgagcacatgttcttcgctgaggaccgcatcaaggctgtccgcgagatgatctgcgcacgcaccgtggaagagcgcgaggctgctctggccaaggtcgagccgttccagcagggcgacttcgaggctatgtaccgcatcatgggtgagcgcccgatgaccatccgttatctggacccgcccctgcacgagttcctgcccaccaaggacgaggacatcaaggaactggctgccgacatgggcatgacctacgaagacctgaagaacgtggttgcttctctgcacgagttcaaccccatgatgggtcaccgtggctgccgtctggctgttacctaccccgagatcgctgctatgcagacccgtgctgtgatcaaggctgctctgaacgtctctgctgagaccggccatgtgatcaccccgcacatcatgatcccgctggtcggcgaggtcaaggagctgaagttcgtcaaggacgttgtcgtcaaggttgctgacgagctgatcgctgctgccggcgttgacatgaagtatcaggtcggtaccatgatcgagatcccccgcgcagccctgactgccggcgagatcgctaaggaggctgagttcttcagcttcggcaccaacgacctgacccagatgaccttcggcttcagccgtgatgacgctgccaagttcctgggcgcatactacgagaacaagatctacgagagcgatccgttccagcatctggatcaggtcggcgtcggcaagctggtcaagatggctgcccatgatggccgcgagacccgccccgatctgggtctgggcatctgcggcgagcacggcggcgatcccacgagcgtggaattctgccacaacgttggtctggactacgtcagctgctctcccttccgtgtgcctatcgcccgtctggctgctgctcaggctgctattaaaaacccgagagcataaggattttatagcgagttatcgttaaaaatcgagcataaaataaggctcaccgtcaattttggcggtgggccttatttgtttgctcatgtatgagatgagttgcgtttaacacagggctgcttcccagaagcatcacagatacacctccacggtcaggtcggtccacgctgcacggcggaactggtggggcatcttgttggcttcccggtaacgcttggcggtttcaaagtcgatggtgaaggtaagaatgggcttttccgatacagccatcagattggtgcgctcctctttggacttcttgcagccggtgttcagcttccagcggtaggagtaatcggcaatgggggtgaccacttcaatgaactggtcaatcaattcgggagcaagacgggcaccgtgcacatcgaccttctgagagagaaaatcgtagatcgctttcatgtccgaagaaaccgtctgcggttcgggcgcaggggagagagctttcagttcctgttccaagcgggcaatctcgtcatctgcctgtttgcaaagggcttggtattcctctcgtggcagttcgccgtctgcacgcatggcagcgtagttcagcttgcgttttttgattttttcgatctggccctgaatcggtgcagcggacattcgtgtggcggcttttccgttctggcagctttcgatcatcttgcaggcacgaaggatggctttattctgattgccccagaccttttcaaagatcttcttcgccatcagttccagcttccactccgggatggaaatggcatcacaactgagctgctgggtcatgttgtgctccagaacgaaggaacgggtcggattgacggttcgcatattgcattggtagccaaagaccggcgttccgtccttcagtttacgccagttgaaaatgcggtaggaagaaccgcagcggcaacgaagttttgcgacccataaatatttggtgctgtcaatgcccttgcgtcgtgtttctccatcaggaagacgcagattgacaatacggcttttacggatgcgctcacattcatgccagagggcttctgatacgattggttcaaagttgccttttacatagacgaaggaagtttcgtccagattgttgatgcgcttcttttcaagatagttgttgaccttggacttgttgtagcagatatagcccatatacgttgcgttacgaagaatgcggctgatttttgtacaggaccaactgacgtttccgtgcccatccttacggcccagccgggaaagttcattgacaatcgccttttccccgtagccctgagaatagagcgtgaaaaccatccgtatggtagcagcctgttcctcgttgataacgtatgtacggttgaccttatctcggtcatagccgataatgttgccgctgccgtaaagcacgccgttctgccggcttatcttttgcccggcaagaacacgctctgaaatcttgcggctttcctcctgcgccatggttgccatgatggaaagccggagttcgccatcgccgtccattgtccagatgttgtcggatacaaaaaagacctcaacgccgaaattgcggagttcacgggtaagctgaagggtatcgacggtgttgcgggcaaagcggcagacctcacgagtaacgatcagatcgaattttccgcacttggcatcggaaagcattttcataaaggccgggcgctttttggctgaggttccggtgatgccctcgtcgatatagcggtcaacgacctgccagttgggatgataccgaagctggtcatcgtaccattgcatctggttgccaagcgcatcgacctgcgcttcatgctgggtggaaacacgaccgtaaaagacaatgcggcggtcacggtctttgtccaatgggaattgcccaaagtacattctttgcgtgatgttcatatcgctgtacctcctttgcccgtagtatagaagattgagaagagaatatgtaggatgtcgccggtgtcagcgacatccttgacattacgcagaatatctgctaaggacctgatgatagacctcagcagagatcaggttgttgtcaaataaaatagaaatcagcttcagtgcagttgcatcgatgctgaaaacatcgggaggaatagcgggggaaaggggagagtaggcgttcttgttgatattatcgacctccgttcaaatccagactgttcatcaggacttcgttgatctggtacatttcgtccggcgtagtctgccctaggagccgctgtatgcgttctttatcaatggtgaagatctgctccagcagcaccatagagggccttgaaaacgccggatttcggtcaatgagaacatgggtaggctggtttggctttttggtgacttttgaggtcacagcagccacgatcacagtcggcgcaaatttattacctgtattattttgaatcacaataacaggacgtttaccaccctgctcagaaccatagtgtgggtcaaggtctgcatagtagatctcgccccggagaaaaccaaagtcttttgttgcatatacggtggcagtcaacccccttttgcttatgtaggcaaaagccgcccttgcggacggcttctgcgatgtgaaaggaaacctacatgaagaagtaagatcactgcttgatgggcagattaaagcggcggctggcaccgttgtaggtgcgaagaatcagcatcatatacttgtagctgacggtgccgctcagggatttctcatcccgcaccagcgtcatgggatggatggtttgcagacgcttcaccagacgctccgggtcatactcgccctgatacagagccacaaagcgaaccatgccctgcaggatgccggagcggagggaattggggtcaccctcccagccctttgccagcatggtcagggcttctttgtaaaggtctgcgccgtaggctttgtactccttgaaagccgtgcggatgcagataatcttccacggagcacggtagttgtccagaccgagctgcaggccggtgctttcggtggctttcacgaatgcgagagattccgggtctttgcccaccaaagcggcgcgcagctctgcgccagcggtcagcggcgtggaaacgcccgtctgccgggaaaacagcatggcttcttcttcctctgtcagtccctcatacaccttgcagatgatcggaagatcctgcccgccgttcatcgcccgacgggtcacgatggtatgctgaccgtcaaagacgaagtagtgaccgtcccggtagctgaccttgggcgggttggcaatcagctcggtgaactctgccgacatcttttcgacattgggaatgttcagcttgcgctgatattccgcagggatttcgagaaaggcactgttgatgaccttttcttcgtaaggccgctgagcgaaaagggcttcgatgattgcttcatctgtgatttcgggcatgatctcaggcatggtgctgacacagttcatattcttcatagcagttcctccatcttatcttccaaatttttcaggtaatctctcaatttctgaatcgttcgtcctacggacgcacggttctctgcatcggacagaatatcgggatattcccggaaaacgctttcccagcggcgcatcatactgttggcggctcctgatacctcgcaaagcatcgccgcaccattggcaagctgcttgacatggtagcgattgtttgcgatttcaagaatctgctgacggtcgattttcaacggttcattcactctttgtggaaaagtctgctcctgcggagccggagtgtgaaccagttcttcgtccgtgcattcttcctcggatgtactggaatcggaaagcggtttggctgctagggacggtgttgttctggtcatggcggttttcttttggtctttgggtttgcagatttcagctaccagtgccggacgttcttcgggaggggcacgggcgacggatgcaatctcggcggcggtcggcttgacctcgccggaaagcactttctgccgtgtgccgggaacagcttcttcggcagcgtccaaacctttagcataatgttcggcttcaatcacatacgttcttcctacaccgctttccgcagcgactttataacaggttttgggtgcaccgatcaggttacgctttccgtaacctgattttgcagcaggactttttctatcaccgccgttggcgcatttttcagcttcatactgcttaccgataaggtacttcttctgttcctgggtaaggttgcgtcgccctagctggtttttgcagatccagataattgcttcatagcggtttgcaaacgctttctcatgagtggtaaaagggatctccgggtgcttcttagcgatggtgaagcggttgtgtccatccacgatcaagccccgccatacgatgatgggattgatgatgcggccatctcgcaggatgttagcttcgagctggttcagttcctcaaaggtcagcggcgggatcttaccctggaactccgggtcgatcttaagcgcattcagattcatcatcgaaccgtcccttcttaaagtagctggatttcgggctggtgggctggatgtagtagtcgtagccgaagttggtctggcagtaggtgcaaggctccttggtgagctgataggggtctgcacggcggacacggatgccacgcgtgttccgaaaggcattcaggcagcggggacagagggtggtcagggtcgattcgtcggtcttgtgggtaaaagtacggctcataatcaatacctccgtgtcatcaaaatgaatattcggtatggaaaaagcccactgccttgattcgaaagaatcccggtggtgggctttgaagtttttgttttaagtgtcccaccctatttgtcctcgacgcccggtgggggttggaatacacctcggtgagggggactgcacccttcctctcattggcttttcagccaccccgccttctttatggccgggccgcgaattacggaagtttcattgttttgtccgagggaatgatattcagttttcaaggtacgtcttacagcttcgggcttctccccatctggggtgttgcccttgctgtgaccatagtgtacctgaaaactgaatgcttttttaggaggtcgtacctccggttttttggcttaaaaaaccggaagtgatgcttccggttttgacacaaaaataacgttgagtcgatgtttcatttttgcaaaaaatacgataaaattgaaatttttcaaaaaagttttttgagcacaaaaacaaaaaacgcccctctgaacaagcagcgcaatgctgcctgcccggaggggcgcgattttatatagagttaaagttcttcagcgattgcagacagtttctgcataatacgctgcaatttcaaacggagcttttgatttgtcaaacgcttttgctgcaacttgtttcgtaagctttcttcttggtcagataacgactttcccataatcaaatgatccagtgttacatcaaaaaatgcagcgatctcgatgaaaaggtcaatagaaggaatatactccccactctcaagactgcagaggtggcggtcgctgacattcaagcggacggccagttcttcctgcgtcaggtagcgctctctgcgcagcttttgaatacgctttccggtgttgaactgatcataatacatcatatgccagccctccgaccaagcaggtaggcagccacaagctgcgccacaaggtcagagcgcaaagatacagtcggcgggtcagattctgtttgccgggacttggtttgtactcgatgattctccttttcatgtttttgtcctttcgttttcaatggtggaaggcgggcagagcgcaaaaagcgcagtgcatctttaataacagagaaaaatctctatgttatagggcaagaagaaaaacgtcagggctataatgcaggcattgataaatagcagcggcttcgtacaatgctggtgcatttccaatagggtacataaaccgatgtcaatgtgttatttatcggatttcctgatcgattgcagtgaaaatcgaggcgttaaaaaaatctacaagcgtaattccaaggccatcacacaattttttgacggttggaacggtgacgctctgttgagaggaatcaagcatactgtaaacggtggacggagtgacaccggaacggacagcaagggcattgggacttatgttgcgttcctcgcaaagctctttgaaacgtaatgcaacggcatcttttacttttgtatcctcatcggtcgctaatatcatatgtctgttctccttttttgtagatattagcggaaataggttgtttttgtgtacggcgcaccgtatattcaagaatgatattcccgaaattttgccacgaaaatcaaccgacagaaagacaagaaaaggtatcctccatttggttaatggaagataccatgtgtttgacaaatcttgttattttaaccattctattttaccattgaattaccattgagtaaagagggttcggcatcattttgtacccccccccggagaattttcagcgatatagtcaatctttttgtgatttgttgtccaatttgttcagataatcaaccacaacttcaattttcaaatcattagtggtcaataaggtgtcagcaggaggctttatatggcaagacgcggtgaaaacatccgaaagcgcagcgatggacggtgggagggtcgatatatcaaaggccgttctgcggacggaaagccccgctggggctatgtatatggggcgacttataccgaagtaagggaaatctctgcccgcaagaaagcagagtacggtatttataacctgaacagcaccgatattactttttcggaaatttcagagcaatggttgtattctgtccggcagggtgtaaaagaatcgactttcgcacactatcagtatactttgcgacattatctccagcctgttttcgggaatttcaaagtgagtgctttaagcgaaaaaattctggagcagggacttttggcagtgataacaccagccaacggaaagcaaaagcctttaggggtaacaatggcacaggagtgcttgtcgatgctgcggcgcatctgcaagtatgcagcacattttcatctcattcgccctttagagatcacggtaaaactgccacaaaaatcctcaaaagtactgctgccgtttaccatagaagaacaaaagaaattacagtcgttcgtgatggattctcctacgccccggaaaataggtctactgcttggttttcagttagggctgcgtatcggcgagatttgcggattgaaatggggcgattttgatttatcggcaggaactgtgacgatccaacggacagtgactcggatttcttgtggaaatggccacacaaaagtcgtcgttcaatcccccaagacccaaaactcccatcgtgagattcccattccaaaatcgctgcttcgtgttctgaagaagctgtcggaagatttcagcagcggaacttggtttctatctggcaacgaggaaaagccagtcgaacctcgatgctaccgtaagagcattcacggctatctgaaaaaagcctgtgtccatcaggcgcaccctcatgcgctccgtcatacctttgcaacgacctgcttgcaggcgcattgtgacattaaaaccttgagcgaactgttgggtcatgcagatgcagcagtcacgttgaaaaaatatgttcactctgatatgacacgcaaacgacgagaaataaatcgtgttttcgaaaacttttaagggggcgattcgtggtcgagcacttgtgaaacgttcgataaatcgcaatttattgagtactttcttccattaaccaaatgagagatacccctttatgcgggaaggggtgaacaaggtggcattgtgcctgtttgagcacaacgaaaaagcatatcatgcggcagtccggatgatggagcagtacggcaaggctgccattgttcatcccaccggcaccggaaagagctacattgcgttcaagctgatcgaggacaacccagagaaggtcgtaatctggctttctccaagtgaatatatctttaagacccagctggagagcctgaaaaggaacgacccggattttccgctggcaaacgttctcttttatacctatgccaaactgatgtgctgtacacaggcgcagctggagaaaattgcagcgcagaagcctgcctatattatactcgatgaattccaccgtgccggtgcggaatgctggggcgaaagcacggtggctttattaaagttgtgcccggaggcaaagcttctggggctgacggcaacaaacatccggtatctggataataaccgtgacatggccgaagagctctttgatgggcatacggcgagcgacatgacccttggcgaagcagtcgtcaggggcattttgcctgccccgaaatatgtaactacggtctaccagtaccagaaagcccttgcaaagtatcaggcgcgggtggataacctgcggacaccgggcattcaggacgctaaccaaaaatatctggatgcgctgcgccgggcactggagcaggcggacggtctggacagggtctttgcccatcatatcacaaacaaatctggcaagtacattgtgttctgcgccaacaaggagcacatggacgagatggtatcccatgtgccggagtggttcgccggggtcaacccagatgtggtggtgtacgaagcctactcggatgacccgaatacggataaggcgtttgcggacttcaaaacggacacaagcgaccgtctgaagctgctgttctgcatcgacatgctcaacgagggcgtccatgtggagggcatttccggtgtcattttgttccgtccaacgatttcgcccattatctacaagcagcagataggacgtgccctgaccgctggggataatacaacgccgcttatcctagatgttgtcaacaatttcgagggcttgaccagtatttccggtttgcaaggcgagatgcaggaggcggtccaccggctctatgccaacggtgagggcgataggatcgtcaccgagcgattcgaggtcatcgagcaggtgcatgactgccgggtgctgttcgagcagctgcaggcgagcctttcgtccggttgggagcactacttctccgaggcaagcatctactatgcggaacacggcaacctgaatgtcccgaaactgtataccacgcccggcggtctgagccttggcgtgtggctggtcactcagcgtcgtgtgcgcgagggacaaattcaaggcatcctgaccgaacaacagattcaacggctggacagcatcggcatggtctggggcaaccggaaggaaattgcgtggcagcacggatttgaggtcgcaaagaaataccacgacacctacggaaacctgatggtgcccggaaaatatgtagacccggacggctatcccttaggacagtggatcatcaagacccggcagcaaaagctgaacggccgactgaaggaagaacgcatcgcacagcttgatgagatcggcatggtgtggaacattttcgatgccaagtgggaaaaggcttatgcgctggctgcggcttattatgaggaaaacggcaacctgaatatcccacgttcctatgtgacagcggctggcgaacggctggggcaatgggtcgaaagccagcaatgggcgtacccgaaaggaaaactgacggaggaacaggtcgagcggctcagccggatcgggatgtactggggcaatcgcaatgaccgcaagtggaacgaggggtatcaggaggcaaagcgctattttgatgcccacggcgacctgaacgtcccagcagaatatgtgtcaccgggcggttacaacctcggaaattgggtcaaacggcagcggtatacccgccagaatcctgaaaaaagcggcgctgttttgacagaggagcggattgcaaagctggatgaaatcgggatgcggtgggggaaaagtaaccctaagcacccgtctaagcaggcagcacaagccgaaagagttacggcaaaagcaggttgaagcaaggaatctataaacaaacgcgaatttatgtgaggagaaaaaatggctacgaatactgtcggaatcgataaggaagttgaagttgaccgcaaggaaaatctgcgcgaccatcgcctgtactggatcgggcgtcggacgcaggacgtaatcttgtcatcgctggcactggtggtgctgtcgcctgtcatgctggctacggccatcgcaattgtggtggatgacccgtctgctggccctgtcttcagtcaggaacgcattggccgcaacggcaagcccttcaagttctataagttccgctctatgtgccccaatgcagaggcaaagctggatgacctgctggatcagaacgagatggatggtcctgtgttcaagatcaaggacgacccccgcattacccgtgtgggtaaatttatccgcaagaccagtatcgatgagctgccgcagctgtggaacatcctgaagggcgatatgagcatcgttggcccccgcccggcacttccccgcgaagtggaacagtacggcgactatgaaaagcagcggttgtatgtgacccccggcctgagctgctactggcagatcgccccgcaccgcaatgacctctcctttgaggagtggatggatctggatgtgaagtatgtcaaggagcgcagcttctgggtggactggaaaattatttttaagacgtttaaggtgtgcctgctggggcgtggggagtaaggggtatcaacttacataaagattgggagaatagccgtgggaaaaaagaaaaaaatcttaatggttcataatttttatcaaataggtggcggagaacatacggttttcaaaaacgaagtagaactgcttcgagataatggccatgaagtaatagagtatacgcgtagcaacgatgagttgaaatctgataaatggaaattgctctttttgccttttacaacagtgtggtctcttagaacctatatagagatcagaaaactgataaagaacgaacaaatcgatgttgtgcattgtcataacacgtttccattgatttcgccatctgtgtattatgctgcaagaagtatgaaagttcctgtggttcagacaatccataatttcagacttctctgcccgaatgggtctttttactgcaaaggcaaggtgtgcgaaaagtgccgcgagaacggaaacttcaaagaagcaataaaaaacaaatgttatcgaaactctacacttggaacgataattgtcgcggcaatgctgacgattaacagaaaattaggaatctataaaaaaatatcatatatctttttgaccgaattcaacaaaagtaaattcgataaactcatcgatataaattcaaatcaggtattcgtaaaacctaattttgtaagcagaaaaggggagccaagcaaaggagcacacaagcgagtgttcatttttgcaagtagacttgaagaaaacaaaggaataaaactccttttggaattgtggaagttgcttcctaaggattattgcctgcacatttatggagatggaaccctcaaaaatttcgttgaagaaaatgtgaaagagaatatttccttttacggatttactccacagaaaactatttttgaagatttatcaaccgcaacagcacttgtatttccaagtatctggtatgaaggattcccaatgattcttgcagaggcaatggccattggctgtcctgttgtatcgacaaatataggcaatgcaggagatattcttgtcaattcaaaaggcggaacgatatttgaacctgacaatcccgatacatttataaatgctattgaagacgttctgcagaacaacgaaatatatcaaaaaaacgcactgacctattacaacaaaacactgtcaaaagataaaaattatgctctccaaaacgatatatatgaacatttattcggggggagggtaagaacatatatttatgcaggaagacttgataaaggaaaagggatactaaaactgcttaatgaatggatcaatctgccgggcacctatgtacttgaagtttatggagagggtgagtgcgcagccgatgttcgaaagttagcagctaaatatccgaacattcatttgaatggattctgtccacaaaaagaattgttcaattccttaaaatccgcagtcgcattgattacgccctatatatggtatgagggctaccctatgaatattgcagaatgtttctctatgggagttccggtcgtatcaacgagtattggaaatgctggcgacttagtttcaaaatcaaatgcaggaactctatttgattttgaagtcgatggctcttttagaaaagcgttggatgcagtttatgaacaacgaacgaaattttcgtttaatgcttataactattacttgtgcaaccaaacacctgcttcaaattatgaaagactgaataaaatatatgatacattgtaagaaaataaagaatattcctgcacgcgtaaatataattggcgtgccgatttcagtagtgaatatggagagttgtatttcctttttactctccaattgggatgctgtacatggaaattacgtctgtgtttccaatgtgcatacgacagttatggcacatgatgatccccaatattataaggtgcaagcggagtctttgctgtctgtgccagacgggaaaccactttctgtaattggaagaaagaaatttccgcagatgaatcgtgtcaccggaccggatttgatgcgaaggctttttgaagagtcgaaagaaaagaaaatccggcattacttttatggaacaacgcaagaaaatataaatgcgcttcttgagaaaatccaaaaggagtatccgtgggttgaagttgtcggatgtgagccttctgtgtttcgtccgctcagtgaagaagaggagaatgcactcatagctcgaataaatcaaaccaatccagatattgtctgggtcgccttgggcgctccacgccaagaagagttctgctataaaatgcaagggaaaatcaacggccttatgattggcgttggtggagcatttaatgtcgtctctggcgtaattgatgaagcacctcaatgggtgcaggatattagcatggaatggttttatcgcttcatgaaggaacccaaaagattatttagaagatatttggtgaccaattctaagtttatatggttatcgctactaaatgaacacacaaaaattcgatgattagaaatttctgtaaatatgaaacaacttaaagtgaaaatccatacacatccaatatatattttctggatgctaaaaataatatttgatatgttttatcagctaaaaatgctgactgttataataacggcttttgccattctattgcttataattgcaataacaaaaagattccctctgaaaccttgtatcagtgatacaatcgttattttgattgcgttgatgtttacgggatcatggcttaaatcaccagaactatatcttgattatttgaaaataatttcttcgctgcttttatactttttaggcagattctatgtaaaagatattgatacggtttgggagagcttaacatcatcacttctttttgctctagttataaatcttattgtttgcctcgccggaaaaggaacaatagtatgggggtcagctgtcacatatagaggaatgtattttttcaaaacggattttgctgtcatgctctgctactttctaatcacatggatttataacaaaaagatggaaaaatcagattttattcctcttgctatcgcagtggtactaattgtactttgtaacgcacgaattatttatctatgcactatcgtcgccttatttattttctttcagtatagaaaaaataaaaaaatcatttcattcaaaaatgttttgatgcttgggtgtgcgtttttagtttgcatatatgctcttcgctttgtttcaaacaccaaattttttcaggatagaggactactcagcttgcatttcgataaattatcagatttgatgaatgcaagcaatactcagggcagaaatgaaatctggacattgttactaacagcatttaacagacaaaatatttttacgaaaatatttggagcagcaatgaacttcaatcaaatatttggatattcaggattgaacgagcataacacatatgtaaaagttcttataaatacgggatattgcggattggtattgtttgcattgcttttttttattgcaattaaagaaatcaatgatacacctgatagaaaacttagctgctatacattatctgttttaatggtgtttttgatagtcggtttttcagttcctaccattctatatacaaactgttcttggataccattatttatgattggtggttgtatatcctccgcacaagaaaattataatgtagaggtagttgaaacgtgaaaagcaatgtaattaaaaatactataatgctctatggtatgtcaatcgccaaaatcgtatttccccttttgacattgccgtatctgacccgtgtgctttctgtagaaagctacggcgtggtttcgtatgtaaaagctgtaatgcagtatatgcagttggttgtagattttggctttatgctgtccggcacaaaggatattgtaaacgcgaagaacgaccacgaaaaattggaaaaagaagttggtgacattctccttgcccgcgttttgttggcggcggcggcttttgttgccctgctgggaatgattgcggtgattcccctgctgcgcgccaacatcggatatacgctgttggcatttgtgacagtgtttttgtcggtgtttttgtttgattatttcttccgaggtatcgaaaaaatgcaggtcatcacgctgcgctttgtcgctatgcgcggcatcgcaacagcattgacttttgtttttgtccactctgataaggacattttgtttgttcccttactggatgcagttggttcgctggtggctgttatccttgtgtttgttgaactgaagaaagaaaacattaagattcacttttccggtgtaagtacagcgtggaaaaagctaaaaaattcgtttgtctattttgcatccaacatggcaacaactgcatttggtgcattgaatacgctgctgattggcgcattccttccagcaacggaagttgcatattggagtgtctgtatgcagctaattggcgcggtgcagacgatgtatacccctattacggatggcatttacccagagatgatcaagacaaaaagctggaagtttatcaagcggcttctgatgatttttatgcccattgtattcgcgggcagtgcgttttcaattgcggtagctccgtatgtacttcagattgttggcggtgagcagtatattgcagcgacttctctgttccgcgcattggtgccagtactgattttcagttttccgggaatcgtgctgggctggccgacattgggcgcactggacaaggccgcacaggtgacaaaaacaacaattctgtctgccgttgttcaggtggcaagcctgctattgctgattgcaacggggcgttttaccgtgatgtggatcgcgatattccgctgtgtaacggagtttgtccttatggcaagccgcggatggtattgttggaaatacagaagagaattttgctaatgtaacgcaaggggcaaaaggaggctatcgtgacggaaactaaggaaaagaaagcagaagttcaaatcaagacggggaagaaaacgacggcgcaggaagcattccgaatagctgaattatttgttatatgggctgttcgctcgtttttgtattcaggatgtaccttttgtgttttcctggtcttctactttatttatggaaaggcctctagcaatgaacttgtcgaagttggagcacttgtatgtggaatagtatggccgacattgtttgaaaacaatcaggtcgataaaattcacggatttttgaaaggatggcttttggtttcattctttattttcgctataaattatatagtagtgtaccgtagtgcatttattggtgttccattgtcagatagagaggaaacctcatgtgcttttttgcttcttgcatttgggatattatcctggattttatgtgcggcagtttcgatttataaggaggtgcgctccgtatgttgattgaaaaagttatcacaaacttttctgatgtaagcctctgggcaatagcacttgtagttgggtatgtcctaattggtgcgattttgctattaagattggcatggaaaagaaaacataccaagatggagaatgtcactcaaaacacacccattgaacaaagtaaagaaatatacagagagagtcaaaatgacacaaaatctgaaaattcagacgccacaaaatatctacctgtcccacaagaacacgttagcataattgagcaaaaagatttctcacatttttatatcactctcgagcatcatcttaaagctccgtcaaaatttctagataccctaaaagatttgtgggaagagccaaatgcttctaccggtatggttgctacacctgaaatgtttttctccagtcaagaattttatggaagttgttatgacaatcttgcacatgtcgaaaagaagcaaaatagcgttgttaaactccgtgagggcacacttataaatttaaacggaaaaatctaccgagttcgaaaaattgagattcaaaataaggccacgtcatcaagcgttcgcttagatttagaaaaactatcggttagcaactattcgctagagaaaagagataaccattatgcaagacttagaaggtcaaatagttgattgcctattaaggagaattatatgaaacaacttaacgaagaagaagtaaaaatctatcagcttggcattttaaataccgttgctgatttttgcgagaaaaaccaaattcaatactggttggattgcgggacattacttggcgcaattcgccacaaagggtatattccttgggatgatgatattgatattggaatgttgcggccagattttgaccgatttatgaatatttttaatcaagcgaatggtcgctataaatttatttgtcgggagcttggcaatagtttctattacccctatggaaaagtgctggacacggaaactgttttgtatgaaccagatgaaaacggcatgaagatcagtgtgaatattgacgtttttgtctatgacaatgctcctgaaagcaaccaaaaagttgcagaaatgtacaaactaggagattggtatacaaaattaaatgctgttcaaaatggtgttgttggaacgcatggaattataaaagacattgtaaaaacggttggctttgaagttttgaagattttcccgaaaggatacttttccaaaaagattgttgataattcaaagaaatatgctgatatgaatacatcggcagtcggaaatttcacttctgttcccagaattgtttgtgaaaaggatgttttttcttcattcataaaggttccttttgagggaagagagtacaatgcacctgttggatatgataaatggctaaacgcattttacggcgattatatgcaacttcctcccgaagagaaaagagtatcccatcatatgtataaagcataccagaagtaaaagggtagtgagcgtgaggaaatgtcgagtttcataattacgcgtaaagaggttttactggaatttttaaaacgaatcggaaaatttgatgaaatgtggcagttaacagaagcaactatgcgaggtgaaattccatttcggacgagctttttatgcacttttgagagagtgtattgaggtggtgaaacagggcgagcattcgcccgaaatcgagaggtcgttccaacaacttgcgcgcgcaaataagtgcccggtgatttggggatgtacataatgcctgtttttatgaaaggtataagaatgacattgatgcaacggtatacgatccgttattgtttatattgaaaaatgaaagaagaaaatgatgatgagtaaaattcttacatttggagtatatgactacttccatttgggacatctgcgactgttcaaacagtgcaaaaattatggagattatttaattgtggctgttcaagacggagattacattaagaagtataagccggattctaagatcttatatacgaccgcagaacgggtagaaatgcttgaatcattgcggattgttgacaaagtagtggtatatgaatcggttgaaccaaagtttttggagtcagttgactttgatattcttgcacttggagaagaccactgcggcggacgatttgatattgttgagcaatggtgtaaggaacatgggaaaaaggtagttcgattaaagagaacgaagggtatttgttcttcggatataaagaatagtttatcggaataagttggaggaaataaaaatgtctgcatttgataacgcaacccttatgatcactggtggtactggttcttttggttctaccgttctgaagcacttcttggattctgacctgaaggagattcgtatcttctctcgtgacgaaaaaaagcaggatgacatgcgccatgagcttcaggccaagcatccggagaatgccaagaaggtcaagttttacatcggtgacgtccgcaatccgcagtccatccgtgacgctatgcccggcgttgactacatcttccacgctgccgctttaaagcaggttccttcctgcgagttcttccccatgcaggctgtccagaccaacatcataggcacggacaacgtcctgcacgccgccattgatgccggtgtaaagcgtgtcgtctgcctgtccaccgacaaggcagcctaccccattaacgctatgggcatctccaaggccatgatggagcatgtcatttatgccaatgcccgtgtagctgctgagcgtggtggcactaccatctgctgcacccgttacggcaacgtgatgtgcagccgtggttccgtcattccgctgttcattgaccagatcaaggctggcaatcccatcaccattaccgaccccaatatgacccgcttcctaatgaacctggacgaggcggtagatctggtcttgttcgctttccaacatgcaaatcctggtgatttgttcatccagaagtctgatgcttccaccatcggcgatttggcaaaggccgtccagcagctgttcggcgataccggtacgaacatcatcggcactcgtcacggcgagaagctgttcgagaccctgatgacccgtgaggagcgtctgcgcagccaggatatgggccattatttccgtgttgctgcggataaccgtgacctgaactacgataagtttgtcgtcaacggcgaggtacatactatggcagacgagtcctacaccagccataacactacccgtctggatgtggaaggcactgttaagaagatcctgaccaccgaatatgtccagaacgcactgaagggcattcactcagataaaccaccacggcagttccagccacaggttatccatatcccccaccggcttgacggcattggtttgagtgaccgaacatcaaaatcaagtcatggaggctcgcatattgagcaatccattttctttccactgcatcatagggataaccggaattccccagcatctcttttattcaggatttttctactgaaatccggattccaaatcctccctctgagtatgcaatgcttatccatgtttcatcttttcttagcaaaacgcctgtcgaaatgctttctgaagccgatgcctcttcagcgtatcctaagtttttcaattggtcaatatatttttgtatttcttcttcagagatattattataaaagattgcataatacccagcattagaaccatccaatatatattctatcgttccactttccggctcacaaataagcctagtgtattcattatccggccaaactgaagtataaatacattttacatcagacggattggttcctccatgtgtagcaaattttccctgacctgaaaaacgaatgcaaagaaagaccaatatcaaaactataaaggcaaccgccatactgctaaaaaattccaatttcttattcatttggcttgctccataattcaaacgtacaaagccacgattcttttctttcgactctaaagaatcgtggcttttatacccattatctaatgcttttattacggaatcgtgatgtcgtaggaaatggagaactggccaccgtttgccaaagcattcaatttgttttcaaggaaattatctgcattggaatcacctccatcacggttttcattttagatgttgataatagcaaagcacaaatagaaaaaaacccacaatattgtagcaagacggagaaaaaatgtcaccaaaacggtgtaagcgcaaagcagggattggttcttgacctctgttgtgagagttcacaaacgtccggggtgctgttgccggaaggatgctttcttcaattttcttccagaattctctacaaatagcaggctgtttatgcttcttgagaatccatctagtgaataccgacaccctccatgatcttttctatccaatttgtggaagaatcattttttggtatgctgatactatcctgcattgtttcaatggacgttctattatcacaaagtgagtgacttttatacaaatcagtatgaccaccaaaatcaaggtcacagtcattgtgattactttttctttttttctcatcataaatagacaatacacctccaatcttttgctcctaataggagcttttgcttagtcaacgtagctcgccttatgtttgtgacagcttttttgaaaaaatctctgcttttcgttatgtttgtacgcttatacaaagaatctccatgttatttgttgattctaacaaatagcatggagtttcatattaaaatacgttttcagcaattttcataatctcatctcgtgaaatgtttcccataatcgtgtttgaaacgcctccttgctcccagcttaaaatataaacggtgtctccgttttcgcttgcactcgttcccaaagttgcatctgcgtctccaacttttacattctcataagttgtatgctcattatcaaacgaggactgctgccccggctgtataatggagcagcgaacagtatatcccttgccgctttcttttgacgagtaaacgtgcaaaaagttttctgctctttcaaattcctgctcacgatctcgttcaaatccatccggcacataataatcgctgtatccattcggaagctgttccaatggttctccatccacttgatacgtcagctgcatctcaatgggcaggaacttctgaatcatcgtatagactgccttgcggaagtctgcacttactgcaagcgcgccgagagttaaaattaccagcgtcatggctgcaacaagcactcgtttcagcaccggacggcgtttatgcaatgctgctttcaggcgagcatcccatcgggaagtgtccgggtagcgttccttaagctgtgccggagttggcagctcgtccagttctttttgtgcatctgcacggagtgccatcatcaacgctgcatcaaaagaaacttctgtccgctcactcatggctgttcaactccttccacaataattttcttccacggaaaagccgcatccgaaccacttcatctgtcagtccaagcgattcggcaatctcccggttggtgtagcccatcgccaaaaggcgcagtggatcacggtacatcggcttcatctgcccaatcagttctgtcaggtgttggatgttatcggtgctgactactgcatcatccggcaccggggcatcatctggcacgtctgggatttcttctaatggttcttctcgctgcttgcgaagcatatcgtatgcacggcttctactacaactaacgagataagcgacgagttcgtgacagttttctcgatgaattttagaaaaatttttggcaacgtacaaaaaaacctcttgcagcacatcttctgccagatatgaatcgcccataattttataagcgatatggtagaccagccgcttgtaggtattatatacatctataaattgttcttcgctgctccgatcatccagaaccgccagatacattgccagcattttcgctcacatccctcttatcgggaggaattatgtcaatttgacacaattcctctctgcccattcatataaaccaccacggcagttccagccacaggttatccatggcctgttcctcggtcttttgggcgcggccttttgtcaggtgaaagtatatcgccgtgccaatcagcggatgttcctcgccatcggtgaagccatagcggtacagcagataggtctgctcccgttgggtcagccgtttcaggccatcgtacagttcccggcgcgattcctgctcttccataatactctgcggctgcatggcataagggtcggctatggcttcgatgcgccgcagttgttcctctcccggcagaacatcgtccagcgaaacgcgctggtaacagataccatccttatcctccgtcaccatccgctgttcaaaagtggcaaaggcatcccgtaccatgtccatcatggcgttgcgaatggcnnnnnnnnnnnnnnnnnnnnnnnnnnnnnnnnnnnnnnnnnnnnnnnnnnnnnnnnnnnnnnnnnnnnnnnnnnnnnnnnnnnnnnnnnnnnnnnnnnnnnnnnnnnnnnnnnnnnnnnnnnnnnnnnnnnnnnnnnnnnnnnnnnnnnnnnnnnnnnnnnnnnnnnnnnnnnnnnnnnnnnnnnngttcaagccagcctgtgccagattcatactgcggaaaaggtcatttgccaccttgccaataaaggacttgttgttgtcgatcaggctgtccagcgcagcagcatcgcctttctgtgccagcgcacaaagccgttcattcgtctgcttcatgggcgttttcctgctctgcggcagactgcaagattcccaacagaccgcttcgcagctgttccagtgcttccggcgtggctccttctatacccgaaacgctgtccaacattgcatccgtcaactgctctgccgtaatcgttgggtgctgcacatcctgccctttagtcaattcggtgaacatcttctctgccactttcttgctcatggcttcctgttcggcgtaatggctcccgataccctttttgatttccttgattgccgccatgaagtacatttcaatatcatcaaggtcgccttggtacaccggctttctccgaaggctgatgtcctttgcggctttggctgcttccggggtcttgacccttgtgcgcagcagggtgctcaatgtcgtaagcatggcgttctgtgccgcgatgccggatcaaaatactgcgctatgcggtatgtaagctctgcaaagcgggcgttttccagcagcaggttgactacctctgcattgacacgccctgtgtagaggttctttgcggcttctacggacaagcctaactcggcaatgtcgtagttcttgcggtcgggaatgttggtttctcccagcaggaaatccgtagatacgttgaacagccttgcgattttcagcacctgctcatgggtcagcgtcccttttgcgccgctgatgaagcggctgatggtgcttttggagcagccgatctccttggcaagctccggttggctgatattgtgctctttcatcaaatccgcaagacggacgttggacggtgcgggcagatattcctgtgccatgtggtcggccctcctttttgagctttttcctcattataatacgctctgccgtttnnnnnnnnnnaagggcttttttctttttccgttgcagttttgccgctttttcgcccctcctgcaaaattttccgtatattcaggcaggaagcaaaaaacaccagagttcccacgctaggaactctggtgcaacgcacgaaacaaaggaggattgcccttgagcctgtatcaaactgtcaagtccgccatcaccgttcggcaggtgggagagatgtacggcatggaacccgaccgccatggcatggtgtgctgtccgttccattccgacaaccaccccagtatgatgctgaacgaatcctactattactgtttcgcttgcggggccaatggagatgccatcgacctcaccgccaagctgtttgacctgaacccccggcaagccgccgagaagctgataaatgacttcgcgtttgcgaagcaatgcagtccccagtggggactgcaagtgacagagcggtcttgcgtcagcaagatggaggggcctcgccccgacaagctctggcttgacccggacaagccgcctgccaatgccatcgccctgccgccgcccaagcgtggcctgacggacgagcagtgggcagacatcgcctactgcctgcgggtgctgaccgattatctcgacctgctgcacgactggcgagagcgctacaagcctgccaccccggaggaaccgcatgacccacggtttgaagaagccctccacatgaccgagaccatcgagcacctgacggactgcgttgcatttgggacgccccagcagaaggccgctgccgccgcacagctgctgtccgggtcgtacctgctgatgctggaggagcgcaccgaccgccttgctctggcaaagtgcgcctgacgattcattcacctaaagtggtgcttatcattatgataatcaccactttacttttttaaaggagaaccaccacatgaagaaaaacatttcccgcaaccctttatggccggactggtacaacggtaagaagatcgatgaagtccagtttggccgcgcctttctggaacagtggccgctgaaatgcgtcaacggaacgctgtacacgctggacggcccagtggaggacgaaagcgagatcaagcagcgcatcttggagaacatcgaggaatatgtcacctccggcctgtccaaaaaggtcaccaacattctggagaccatcaagctgctggccttttccgacccgttccccatcgaacaggactgcatccatctccagaacggcgtgtaccatctgccggacggctcttttcaggagagccgcctgttttgccagaaccgtctgcctgtgaagtacgacccaaaagcacccagccctgaccgctggctgacttttctgcacgagctgctggacgatgccgacatccccaccttgcaggaatatctgggctactgcctcattcccagcaccaaaggacagaagatgatgctcattgtcggcaagggcggcgagggcaagtcccgcatcgggctggtgctcaaacggctcatgggagatgccgccagcaacggcagcgtccagaaagtggagaacaaccgctttgcccgtgccgatctggaacgccgcctgctgatgattgacgatgatatggacatgaacgccctgcccaagaccaactatatcaagaccatcgtgaccgccgaagccaagctggacttggagcgcaaaggtgtccagagttaccagcgggacatttatgcccggttcctctgtttcggcaacggtgcgctgacctcactgtacgaccattcggacggcttctttcgccgccagctcatcctgaccaccaaggataagcccaccgaccgcacggatgaccctttccttgtggagaagatgtgcgccgagttggagggcatcctgctctggtgtctggaagggctgcaccggttggtgcagaacgatttccgcttcacggtcagcgaacgagccgccgccaacgtggacaccatcaagcgcagcagcaacaatgtcatcgactttatggagtccgagggctacttccgcttcaaggcggactactccatcagctccaaggagttctacgacatttataagcagtggtgtgaggacaacgcctgtcacagcgtatcggccatccgtttcagcgcagagctgcgccagaatgaccgccgctataaccttgaagccaccaacaacatctatctgcccggtggccgcagagtgcggggttttgtaggcatcgagccgcttgtccacccctgcccgtaaaaagtgcatttttttacggaagaagttcgtacaacctgtacggtctgtacttgtacgcacccgtacggcaagtagaagtaaattaaaacgcgtcatcgtttatatttcgcgtctccgtacaccgtacagaccgtacgggttatttgaagtccgtacgcaattttttcagatgcgtacggagcaatcaagttcgcattgtgcgaacttgatcggagctctcccgcaggagacgttctccctcggagagtcctcgaagagcccactacactttgtagcccatagggatgaaagtgttatagtgggttattacacttccgtggaagtgcacctccgtcccccgtcacctcccgatgaaccccgaaaggagggatgccctttggcaagaaacgatggcatcgaccgcaccagtgtccgaaatctcgccgtttcggacaaggccgttggcaacacccagcagcacaatgagcgtgaaaaggacagctatcggaaccccgatattatcccccagcgcgctgcatggaacgtccacttcaaaaagcccgcagccagctacaccgacctgttctcccaactggaagccgctggtacgatttcaacgcgcggcttgaagccggatgccacccattactgcgagcttgtctttgatgtcaactcggcctactttgacaaccacggcggctacgagttcgccaagcagttctatgaggatgcctaccaagctgccgttcaaatcgtgggcggtgagcagtatatcctctcggcagtcatgcacgccgatgagatcaaccgtgccatgaccgaagcattaggccgtgaagtctaccactatcatctccatgtggtctatgtgcctgtggtggaaaagcagatcctctggtcgaaacgctgcaaggacaaggcactggtcggcacagtcaaggagaccgtcatgcaggtcagccggagcaagaagtgggcttccaagcccctgctggacgatgccggaaagcctgtcctgcaaaagagcggcaagccagtcctgaagaagtcgtacagtgtcctgcaagacgatttcttccactatatgcgcaacgccgggtatacggatgtagagcgcggtgagcgtggcagcactgaagaacacctgaccgtcacccagttcaaagtccagcgggagcaggagcgactggacactctgaccgcccagattgaccagaaagagcagcacctcacccaaaccaacaaaaccctctccaagaccgaaaaggaacttgccgctgtgcagaaaaaggtcacgctcacaaaagaagccctcattcatgcgcgcgatctggattatattggtaagcgcacctttctcggcaactattcgctgaccgaagaagagttttccaagctgaaaaagcaagccgaccacggctatatgatggatgtggagaaccgccgcctgaaagaagaactttccaccgccaagaaagaggccgttcgnnnnnnnnnnnnnnnnnnnnnnnnnnnnnnnnnnnnnnnnnnnnnnnnnnnnnnnnnnnnnnnnnnnnnnnnnnaaaaaccgcaagcgtgggcaggatatggaactttgattttcggaggataccatttgaacaaaaagaagaagtcgaacaaatccggctacccggatgaagcaatcaagacccttgcgcgttgcttttatccctccatggttgagtttttcaacagcgaggaaggccagcgtgaatacgaggaatggctgaaagagcaggaaactctacaagccttgcctgttgcagcataaaaacagcaggacgctcccagtaaagggaacgtcctgccttatatagatgtgtctcaccgaggtgtgtccagttgggcacacctcttatttttttgtccttaatcttctagcccatggctcccagccacattcttcaaatattccctcggatcgccattcagaatcaaatcggcatagcccagtggatcattgtagataaggtagtccagttctgtctgttgcaccatggtcacattcagcgcatcctcgaccccggtgcagtcaatggaaatttttcgcccatcttggagagtcaactccacgcacccggtatccatgttgaacgaacaggctcttgcatcgtacttcatcatcgtgtcctccaaacgcttattgtgtggttacggtctatgacaaggtatcggagttttacgccgtccacgggagccttcattctcaaacccgaagaaaacgaaaaatccgaacccttctccaatcggaaataggttcggatttttcttgtttggtgggcgcgggtggattcgaaccaccgaagctgaaagcagcagatttacagtctgtccccattggccactcgggaacacgcccatattcagttgttgtgcatccgtgcgccggacgacttgtttattttagcatgagaaaagggttttgtcaaccaccttttttcactttttttcagcaggcttactgtcccccgcccgccgcgcttcatccggttgaattgcgtcctgttttatgttaaaataatgtaaagattctacacattttacaggcaggagtgggtcattgcatggagtcaacaatcagcgccgccccgcaaatttctatcgaccgggaaaagacgctgcgcagccaccggcgttactgggtgctgcggcatgcacaggacatcgtgttctccctgctggcgctgatcctgcttgcgccgctggcactgctgatcagccttgccatcgtgctggacagccccggagacggagctattttccggcagcggcgggtgggacgggacggcaagctgttctggctatataagtttcgcaccatgtgcccggacgccgaggagcagctgaatgagctgctgagccagaaccagatggacggcccggtgttcaagatcaagggcgacccccgcattacccgggtgggacgttttctgcgcaagaccagtctggacgagctgccacagctgctcaacgtgctgcagggcgatatgagcatcgtggggccgcgccccgcactgccccgggaggtagagctatacagcgactaccagcgccagcggctatacgtcacccccggactgagctgctactggcagattgcaccccaccgtaacgagatgagctttgacgagtgggtggcgctggatttgaaatacatccaggagcgcagcttctgggtggactggaagatcatcttcctcaccgtccgcgccatgctcatgaaatacggagagtgacaaaagcgcctgttgtgcatccgcacaacaggcgctttcgttacgtttatttcagcaccgcacccagatttgcactggtgaccatgcgggcgtaacggctcagccagccggtcttgatgttgggctcgggcgcaacgtactttgccttgcgctcggccagcactgcatcgctgacctccagcgtgatggaggcgttggggatatcaatggaaatggtatccccttcctcgatcaggccgatggggccgccggaggccgcctccgggctgacgtgaccgatggcagcaccgcgggatgcgccggagaagcggccatccgtgatgagggctaccgtcttatccagcttcatacctgccagcgcagaggtggggttgagcatctcccgcatgcccgggccgcccttggggccttcgtagcggatgaccaccacatcgcccgggacgatcttgcccgcgtagatggcggcgatggcttcctcctcgctgttgaacacccgcgccgggccggaatgctgctgcatctccggggcgacagcgctgcgcttgaccacacagccgtccggggcaatgttgccccacaggatctgcagaccgccggtctcagagtaggggttctcgatgggacggatggccttttcgttcaggatatgggcacccttgatattctcgccaagggtcttgccggtgacggtgggcacatccagatccagcaggcccttcttggccagctccgcctgtactgccgggatgccgcccgctgcgtacagatccggcatatgggtgggacctgccggtgccagatggcacaggttgggggtcttggcgctgatctcgttgaacagcttcaggtcgataggcacaccggcctcgtaggcgatagccagcaggtgcagcaccgtgttggtggagcagcccagcgccatatcacaggtcagtgcgttgcggatggagcgctcgttgatgatctggcgcgcggtgatgcccttgcgcaccatctccattacggccataccggcgtgctttgccagctgcagacgcttggagtacacagccgggatggtgccgttgccgggcagggcaatgccgatggcctcgcacaggcagttcatgctgttggcggtgtacataccggagcagctgccgcagctgggacagcagttgcaggtgcagtcctccagctgctcgtcggtgatcataccggccttataggcacccacggcctcgaacatcttggaaaggctcacttcctcgccgccgtaagtaccggccagcatggggccgccggagcagaccacggcgggcacatccatgcgcaccgctgccatcaccatgccgggcacgatcttatcgcagttgggcaccagcacaaggccgtccagctggtgtgccatcagcatggtctccacgctgtcgcagatcagttcacgggaggccaaagagtacttcatgcccacatgacccatagcgatgccatcgcatacaccgatggcggggatcaggatgggggtaccaccggccatctgcacaccggccttgacagcctcggcgatcttatccagattcatgtgtccgggcacgatctcgctgtaggcgcttaccacgccgatgagggggcgctccagttcctccggggtgtagcccagcgcataaaacaggctgcggttgggcgcgcgctccgagcccttggtcacgttgtcacttctcattgcaaatcctcttttctgataaagccctctccgtcacggttgcgccgtgccacctctcccgagagggagaggtttcgcggaggagctataaggttcccttttcaacaaaaactccccctttcgggggagctgaccgccgaaaagcggtctgagagggttttcctcttacttcttcagccagctcatcatgctgcgcagctcagcacccaccttctcgataggcagctcggcctccatacggcgcttggcaaggaagtgcaccttgcggccgcccttggggctcatctcggtcaggaactcagaagcaaaggtgccgtcctggatctcggtcagaaccttcttcatctccttgcgggtctcctcggtaatcaggcgcttgccggtgcggtagtcgccgtactcggcagtgttggagatggagtagcgcatcttggagaagccgccctcgttgatcaggtcaacgatcagtttcatctcgtggcaggtctcaaagtaggccatctcgggctcgtagccggcctccaccagcgtatcgaagccggcgtggatcagctcggaaacaccgccgcacagcacggcctgctcgccgaacagatcggtctcggtctcctccttgaaggtggtctgcagaatgcctgcacggcctgcgccgatgccggaagcataagccagtgcgatatccttggccttaccggtgtagtcctgctccacgcagatcagagaggggcagccctcgccctcggtgtacaggcggcgcacgatgtggccggggcccttgggagcgatcatgatgacgtccacgttcttgggcgcggtgatggtcttgaagtggatgttgaagccgtgtgcaaaggccagtgccttgccctcggtcatgtagggagcaacctgcgtgttgtagatatcggcgcacagctcatcgggcaccagcatcatgacaacatcgccggccttggcagcctcttccacctccatgaccttgaagttgtcatgggtggcagcgaactcagaagcctttgcccagtgggcagagcccttgcgcaggccgactacaacgttgacgccgctctcggccagattctcagagtgtgcatgaccctggctgccgaaaccgataacagcgacggtcttgccgtccagcacgccgaggttgcagtcggaatcgtagtatttcttgatagccataatcgttagtctccttttaccttttctggttggtttatcttccggtcttgtatgctctgttctatctttcgctcaccctgagcggaaaagcaatgtgatttatgcccgtcttgcgcccggcggaggcagctggacggagcgcacctcctgcggcggcttctggatatgctggtgcatcccgccgcgctccagtgcagtaacgccggtgcggcactgctcaaggatattgtagccctcgaacatttttaagaatgcgtccaacttgtccggccggccgatcaactcaaacaccatgctgtccggggaaagatcgatgatctttgccttgtagatgcaggcgatctcccgcagctctgtgcggttgtgcacgtccgattccaccttgagcagcagcagctcccgctccagcgctttttcgctgtccagcacgaacacctgccgggtgacttccagccgctcggtctgcaataccagctgctgcaaggccttttcgtcgctggtaatggtcaccgtgatgcggctaactgccgggtcgttggtggcggacaccgtaaggctgtcgatattgaagccgcggcggcagaacaggctggacacccgggccagaacgccgctctggttgtccaccagcaggctgatgaccctacgctgatcagattccatgatgctgtgtcctccttattccatgatgatgtcgttgatatcgccgccgccggggatcatgggcagcaccttttcgtccttgtcgatgatgcactcgatccaggtggggcctttctgctgcaaggcatctgcaaaggcttcctgaaactccggcagattggtgcagcggtagcccttcaggccaaagccgtctgccagcttgacaaaatcggtcttgcggtgggggtcggtctggctgtaacgcttgccgtaaaagctggtctgccactggcgcaccatgcccagcaccgagttgttgaagatgaccgtgatgatgggcagctcgtagctgacggcggtgcaggcttcgttcaggttcatgtggaaggaggcgtcaccggtaaacatcaccacacgctgctggcgtcccagtgccatctgggcaccaatggcagcgccgtagccaaagcccatggtgccaaggccgccgctggtgataaagccgcggctcttggtgtggcgcaggtactgcgccgcccacatctggtgctgacccacgtcggtaacatacacggcgtcggggccgcactggttgcacacctcgccgatgacctgatggggcatcagccgggtggggtcagacacaggatggtaatcctgtgcctgccagctctggatcatcgtcatccagtccgggtgcttggcgggcttgatctggggcagcatggcgttcagcacataggctgcatcgcccacgatggaaagatccacgtccacgttcttgcccagctcgctggcgtcaatgtcgatctggatgatggtggcgtttttggcaaaggtcttggggttcagcgccacgcggtcggaaaagcgggtacccaccgcgatgagcacatcgcactctgccaccgcccggttagaggtgtagcagccgtgcatccccagcattcccagattcatcgggtcgccgtagggcacaacgcctgcggccatcagggtgtaggtggcggggatctccgccttgtgcagcagatcccgcagcggctggcagctggctgcgctgcgcacgccgccgccaaagtacaccagcggacgctgggcggcgttgatgaggtctgccgcccagtgcacctgctcctcattataggtagtcacggtgcggataggctccggctgcttgggggtgaactcgcacactgctgcggtcacgtccttgggaatatccaccagcaccgggcccttgcggccgctctgtgcaatgcggaaagctgcccgcatggtgtcagccaagtcctctacccggcgcaccgtgaagttatgctttgtgatgggcaccgtgatgccctcgatgtacgcttcctgaaagccgtccttgccaatgctgctggtgggcacgttgccggtaaaggccaccatgggcaccgagtccatataggcggttgcaatgccggtgaccagattggtggcacccgggccgctggtagccagcaccacgccggtgcggccggtggcgcgggcgtagccgtccgcggcatgggctgcgccctgctcgtgggcggtaagcacatgggtgatgcggtcggcattcttatacagctcgtcgtaaaggttcagcacagcgccgccggggtagccaaaaagagtgtccactccctgctcgcacaggacctctacaaagatctgagaaccattcaactgcatggtgttgctcctattcctgttccacttcttatccattcccccggggagagcttttgaaaaagaaaaagcccttgtcccctgctttcttcaagagacaaagaccttgtaacatcaagctctctgcggtaccactctcgttggcgtgctgtgcacaccctctcacgggcttccaacaaagccctgcacggtaacggctgcaaccggcgctgcttataggggtttgcacccgttgggcaggctgctccgggatgattttccgcacgaaacgctgactgccttgcaccagacggcagctctctgaacagtggggatcgtgtggtactttttcccatctgcgcatttgttgatgtaaattatactataaaccgggcttttgtcaatcgacaatttgtaacctgaatcacccgaaagatgaagcatttttaacaccccttgcatccccgcccgaaccgctgtatacttttgatatccgcgtacctgcgttttgtagggtatgtgccaatggagaggaaaagggatcgacctatgaaactgagagaatggaatgcccatctgcatgggcttgttgtgttccgcgccctgctgaacgaccccgttgtggcaaggcttttagacctgaccgaccgcatggaggcgggctgctcctcctacggcccggtgtgcgatgccgtagccgcctttgaggccgctttgttcgagtacaccaccaactggggcagctacctgagcaatgctgtgctggaggccgagaccatctgcgtgcgacaggccgccgccgggcagctggacgcgctgctgcaaagcgccttggacagcgagctgcagtttttgcagcagctgtgcgggctgacgctggacgaactgttccagaccgcctactcggagcaggcgcagcggccggaactggctttcctgccccggtggcagacctgtgagcttgaccttgccgccgcctacgcccagcgcatgagcgaggtgggcaaaaagggctacggtatgtttgcgaagcaccatgtattcacggtggagaacggccagcttgtgccggtaaaacaccccgacccgcagcgcctttccgagctgcccggctacgagaaggagcgggaaaaggtgatcgccaacacaaaggcgctgctggccgggatgcccgccaacaatgtgctgctgtacggtgacgccggtaccggcaaatccagcgcggtaaaggccattgccaacgagtttgcgtccgaggggctgcggctggtagaggtaaaaaagaaccagctgtaccagatccccgacctgatggacaagctggcggcaaacccgctcaagttcattttgttcatcgacgatctgagctttaccgccaacgacgacaactttgccgccttgaaggccatcctggagggcagcgtaggcggacgcgcccagaacattgcggtgtatgccacctccaaccgccgccacctcatcaaggagaccctctcggaccgcaccggcgacgacatccacgaagccgacacccggcaggagctgatgagcctttctgcccggtttggcctgacggtcaccttccagcggccggagaaggcccggttcgagaccattctggagcagcttgccaagcagcacaacatccagatgcccaccgagcagctgctgctcaaggccgaggcctttgccctgcgtgccggtggccgcagcccccgggtggccaagcaattcatcgagcaatgcgaggccggtgtgcagaagtaaacgcaccagttttaaatgttatcaaaaagcgggacaccaaagcatccgcagatgctccggtgtcccgcttttcttgtcttatttttcgctcagtcccgcacggcgatgcactcgatctccagctttgcgcccttggggatggctgccacctgcacgcagctgcgggcggggaacggttcggcaaaggccttggcgtactctgcgttcactgcggcaaaatcgttgatgtcggccagaaagatcaccgtcttgaccacgttgttcatggaaagccctgcctcggccagaattgctttcaggtttgcaaggctctgtgcggcctgctgctccacggtatcggccatggtgccggtggcggggtctaccgggagctgcccggaaacaaacaccatattgcccagatccagtgcctgactgtaagggccgatggcggcaggtgcgttggttgtagatacgactttcacagtatattttctcctctatattactttaagtttaatgcaaattctcttttcgctcttgcaaacgatgaagtttacacccgctcgctgaccagctggaagccggccttggtcagctcggtgcggatctgctcaatctgggcggcatcgcgggtctccagcgtcagcttgaggaagcagctggagatgggcatattggggtcggagccgtcatgctgcaccgacaccacattgctgccgcagcgggataccacctcggccacctttttcagctggccgggcttgtcctccagcgcgatggtcaggtttgccttgcggccgctcatcacaagaccgcgggtgatgacgcggttcaggatgttcacatcaatgttgccgccggagatgacgcaggccacctttttgccctccaccggcagcttgtggaacagtactgctgccaccggcacagcgcctgcaccctcagccaccagcttctggttctccatcagggagagaatggccgccgccgtctcgtcctcggtcacggtaacgatatcgtccacatactgctcgcatagctgataggtcagctcgcccggggtcttgacctgaataccgtccgcaaaggtggaagcagatttcagggtctggtacttgtgctcgtgcaggctgcggtacatactgggggcaccctcggcctgtacgccgtacaccttgacctccgggcgcagggtcttgatggcaaaggcaataccggaaatcagtccgccgccgcccaccggcaccaccacagcatccacatccggcagctggtcaaggatctccaagccgatggtaccctgcccggcgatgacctgctcgtcatcgtaggggtggataaaggtcatgtcgtactccttttgcagctgcacggccttgtcgtgggcttcgtcgtaggtgccgggcacaaggcagacctccgcgcccagatttttggtgttttccaccttcatcaggggtgcgccgtccggcatacagacgatgctgcggatgccgcgccgggtagcggccagcgccacgccctgcgcatggttgcccgcagagcaggcaatcacgcccttggcgctctcctcctcggaaagctggctgattttatagtaagcgccccgcaccttaaagctgccggtggcctgcaggttctcggtcttgaggtacagctggcagtccttggacagcttgggggcttcgatgaggtcggtcttgcgcgctacgtccttcagcacaaaggcggcgtggtagatcttatccagagtcagcatgacagatacttcctttatttttcgtgatgtcatccagtataagttacaaaaattgttttgtcaaatgaatttcattcacgataaaaggcgtaaaaaagagaaaggcaagggtaaagccactgcctttctctttttattcttattaccgcccacggccaccgccgccgccatggctggaaccaccgcccatgccaccgaagccgccgccgaaaccgccgcgcccggcaccgcccccgaaggagccgccgcccatgccgccaaagccgccgtagaagccgcccggcgggggcggcgggttatgcgggccgcgccgccgtccacggggaggccggggcccaccgaagcaccacagccagccgcaggggctggcaaaaacataggccatcgaccggataatgacgatgagcagcacaacgctgaccacaagggtcaggatgtcggtcagggtgctgccgccgctgctctgcccgccctgatagccgggctgcacggtgctgccgttgccggtgccgccggaaaggctgaccccgtaaatatccgcgatggtgtttgccacgttccgggcacaggtggtcactgcgccgtcataattctttgcggcaaactgatcctccatggtctgggcaatggcgctggactgctttgccagcgtggtgttgcggaagccatcgccataggtcaggtagtagtcgccgtccgcatactgcgccgactccatcaccagcagaatcagaacgccgttgttcttggaggaggaaccgatgccccacgcgttgaaggcctgtgtggcgtattcctctgtggaatcattgcctgtatattctacagtcagtacaccgatctgtgcgccactgcagctggattccagctgggcgttcagttcggtgatggtctgcacggtgctgctgctcagcacaccggcatcgtccaccacgcactgatccttgggcaggctgggcagctgggcggcaaaagccgccgggcacagcactgccgcgctgaccaccacggccagcaccagtgcgctgatgcgttttgcaaagtttttcatgcgaagggctcaacctcctttacgccggacaaagctcccagcacactggccgggaagccgccgacatccttctgatattcatacaccgccgtattgtactgcaaggtaccaatgatggtggctgcactgttgaactggccgtactgcccctgcaccgcgcccatcttcatggggtcatcggcctgctcctgcaattttgcatacagctggtcgatggcagtgcccagcgcctgatcagcctgatacagcgcgtgcatcgtgctgccctgataatagggcagcgaggtcagcgactggcttttgccgccgttctgcaccgcctgcagacaagcggagaaatcgttcagcgccgtctgtgcagccagcacctcggcgctgtctgcgccaagggtgttggaggcagtggtcagaatattcgccgccgtattctcccgggtggtcagttcttcactgaggttatagccgttgtcagcggcgacccctgcggtaaaccactggcgggcggtgttgtatttgccgcgcagcttggcgctgccaaagccgaaaaaggcggccagcatcaccactacgctcaagaccagcgccgccgcccgggtggaaagcgctgcgggcagctttgcttccagtgcggccagcttctgctggcggggcgtcagcgttacggcctgctccggctttgctttttcgcggtagctgcccgcgtcaaaaccgccgggagcggtttgtttgttctgagaaaaatcagcgtttgccatttcagctccggatctccatcattttggttttcagttcgtcctcgatgcgggtcagctcctgctcggcggcaacgcgctttgcgcggccctcgctctggatcttgttcagctcgtccagcgtctcgatcaggctcttgttggtctgctgcagggtctcgatatccacgatgccgcgctggctctccttggcggtctcaatggtgcccagcttcagcgcctcggcgttcttcttcagcagatcgttggtcatgttggtcacggcgcgctcggcctgcatggcctgctggctgtgtgccagacccagtgccagcaccatctggttcttccacagcgggatggtgttcacaatggtggactggatcttttccgccatcatggtgttgttgttctgcagcagacggatctgggggcccatctgcaggctgatattgcgagtcagttccagatcatacagctttttctcaaaacgctcgcactggtcggcaaggtcgcgggcagcctgtgcgtcctccggcagaccggagaccttggccttatccatggcctgctgcagttcgttggcacgcacatcggccagctttttcttgccggcaaggatatacatactcagttccttgaagtatgccatgttcagctcgtacatcttgtccagcatggcgatgtccttgagcagctgcacctgatgggcttccagcatggactggatcttttccacgttggtctcggtcttgtcgtacttggtcttgagggcatccagctggctggttttcttcttgaaaaagcccataatgcccttctgctgctcctcgttggcatcaaaactcttcagttcgccaatgaggtcggtgatcatatcgcccacctcgcccagatccttggtggacaccttggagagggctgcttcggagaaatcgccgatcttcttctggcaggcagagccgtactgcagcacctgctggctgttggtgatatcgatcttctgggcaaactgatccaccatggcctgctcctcgggggtcaggttcacctgtgcttccggggcaggggcagcggcgggcttttcctcctgcggcacagcagcgggggtggggtccagcgtcagggtgggcactgcgggggcatccagatcaaaattcagagtattgtcagccataagtgattccttcctttcaaaatcccgaggggatgttccgtttttacttgctcagaccctgccctttcagcatattctgcaaaacggtcaggtctgcggacaggtccatgctctctgccgcatacagggcatccagctggttttcaaaagccgtggcaatggaggcggcgttgtgctccacctcggcgcggatggcggcggcgttctcgccccgcacaccctgctttgccagctttgcgtactgctgcagaacgtttacggcatccggcagatagtagttggcaaaccggcgcacctgctttgccttggcggggtttgcttccaccgcttccacgatggagcgtcccgccttttccatgcgggtcatggcggcggacagctgcgggtcgggcaacgcctcgttcagcgcgtgcagagtgtccagcttctgctggatatcggtcagcatctggtccacatcctccacaccggtgtggaagggtacctcgtgctccaccacccggggcgggcagttcttttttgccacgccaaaggccacggcggcaccgcccagcgccaccagcagcgcccataatttgtataccggcagcaccgcacacagtaccacgaacaccagcgccgccgcataaaagggcagcacgctgggcttttgggtgcggatgatcttgctcatggtcatttctccttgtccggggcagtgcgccccttatgatatccataatacaacgtccgcaaaaaaacgcaagtatcccgcaaaagaatttacagccttgtcatcattttacgatccagtctgccagcgcagcgccccaaatctcctccagccgggcggggctgcaggcggcgttggcggggcttgtacttggcagacggacagccgggatgccggtaagcggctgctgatattttgtatagatacggtaagctgtggcaccgttgcagaacaccgcccggatgggtgctttgcgcagcagcccggcgatatcgttgggcaccacatcccggatggaggcatccgatgcgccggtgatggtgcagctttccagcgtgtcccacagcgccagcccgtggcgcaaaagcagctgctttttggcggcgatatcctcccgcacgggcagcggctccccggtcagcgccgccagcagcggccagaaccgattttgcggatggccgtagtaaaaggccatctcccggcttttggggctgggccatgtgcctaaaatcagcgcccggctttggtcatcgtacaccggtgcaaagctcataagctgccgcctgcgctttcaatattgccccatgcagagccaaagtctttgccggagggctccgcgcgggggccgtcgaaccacagttcctcgatcagcgccgccacgccatcctcccgcacgtccccgatgatccggtcggcagcggccttggcgtccggggtgccgtttgccatgcaggcactcagacccgcgactttcagcatccccacatcgttggcagaatcgcccacagccacggcatccgccagcgtaagccccatctgtgcacacaggtcggcaagccctacgcccttatccatgccgccgcgcacgatatcgtagtagcagtagccatccgcgttctgcgcgcccgtctgcatccagtgcaggccaaggtagccgtatttttcgtggaagcgctccacttcctgcggcggcatggcggcaaaggcggcgtggggcatatccaccagatgcctgtcctgatcctcgccgtccacgcagtccagcccggggctgttcatcatctgatagccggtgtgcagatactcgtactcgcagtaggcgtaataggcatcccggaagttgaattgcagcgggtagttataatcctcacaaaaatccaccagcacatacatctcctcgctggtaagcggatgctcggctattacgttgccctgcctgtccaccacgcaggcaccgttgcaggtaatggcgtagtcgtatcggatgccgcccagctggtttttgtcccggatgcccgggtaggagcggccggtgctgagcacgaacttacccccggcggcttgcagcttttttaccgcctttaccaccgccgggcggggctttgcttcgccaaagggcatcagcgtgttgtcgtaatcgcttgccagaatcttatattgcatggtcatctctcctgtgtgcatcgttttctcccagtataacacatttcaaagtccagcgggagagggagaaaagaaaaatgggacagcagaatacccgcaggcatcccactgtcccgaaattcaaaatatctttccttatcaggcaaacaccgccacgaccacctgcatggccacgcccacaaaggcaccggcagcccatgtcaggccggtgatgaagaggttctgcttccacgaggggttggcgcgccacagcactgccaggcccacgcccgcgccggtgcacagccccgccacaaggctggaaaagcgcagcgcgccctccacatacagctgggtcagcagcacgctggcggcgcagttggggatcaagcccaccagagccgctaccaccggctggaagaagcccatgccgcccagcatctcggcaaacacgtcctcgcctacgccctccacgatcatgccaaacaccagactgaaagcgaagatgaacacaaagatctccagcgtgtggcgcagcgccgcctgccagatgggcttttcgttgccctcggcatcgctgtgctcctcgtggcagtccacctcgtccgcatggccggtgtagccgccccgcagccccttgggcagcacgccccgcagcacaaaatccagcacaaagcccaccacgatggcgtacaccaccttgatgaccatcaggacggccagcttatcccagtaagcgggcatggataccagcagcgggatagcttcgtcgctggtggcaaggtacaccgccatcagcgtgcccagcgtgatgacccgggaggcgtagaagttggacgcaatggcggagaagccgcactgcggcacacagcccagtaccgcacccggcacagcaccccagcgcccgccgcccgccagcagcgcctcgatgcgctcgccgtggcggtgctcgatatactcgatcagcaggtaggccagaaacagaaagggcagcatcttggcggtatccaccaaggtttcgcccagaacatccaaaaacaattccataaataatcgctccaaagacccgcagggggtcgtctctcaacaatttgcaatcagtttgcattttcgtgcagggaagattatacacgatatccttcccaattgcaataccaaattgcaaattggttgcaattttatgttatggaacattgcagcgcgtaaaaagcgtgaaaaagaggttctgaaaagcccgcgggcttttcagaacctcaaaatttcaaatcattcttccgctgatgatgcgcagagcaacgcggagcgcattccaaatcgtcccacgcagcaaggaagctgcggcctgttttaccccttcagcggtacaaagcccacaaggtccttgacgacctcgccgccgatgatcaggccggctaccgagggcacaaaggcattggagcccggcacagtgcgccgtgcagtgcacttgcgctgagtgcccgggggacagatgcagtggttcttgcagctgatggagtcatcctcgatgggagtcatgacaggctccttggagtagaccaccttcaggtgcttgatcttgcgcttgcggcactcgatacgcatcaccttggcaagcgggcagaccgaggtcttatagatgtcagtcacctcaaagcgggtggggtccatcttgttacctgcgcccatggagcagatgatgggggtgcccgcctccttgcatttcatcaccagcgccagcttgccggtaacggtgtcgatggcgtccaccacatagtcgtactgggtaaagtcgaagtcgtcctgcgtctccgggccaaagaagcaccggtgggtggtcaccttgatgttggggtcgatatcgtggatgcgctgttctgccacatccaccttatactgccctaccgtgctgcgggtggcgatgatctgacggttgagattggtcaggcagaccttatcgtcatcgatcagatccagtgcgcccacgccgctgcgtgccagtgcctccaccgtatagccgcccacaccgccaatgccaaacactgccacccgggcgtggtgcagcttttccatagcctctgcacccagcagcagctgggtacgggaatattgatcctgcattttgttctccttacttttctacgcgggtgatggtgccgccgcccagcaccacatcaccctgatacagcacggcagcctgtcccggggtgggggcacgctggggctggtcgaattccagccggaagccgttttctgcggggtaaacggtggcctgctgctcggcctgatgataccgggtgcgggcggtgacccgcagcggcccggtcagcgccggaatggcgatccagttcacatcctctgcgtaaacgatgctgtcaaacagttcgctttccggcccgacggtgacggtattggcctgcatatccttgccgcagacgtacaccggcgcacccagtgcgaggccaagccccttgcgctgccccagcgtgtagcgcactgcgccgctgtgggtgcccaccaccttgccgctccgatccagaaaatccccggcagggtagtgcttgccggtaaactgctccataaagcgggcatagtcgccgtccggcacaaagcagatatcctgactgtcgtgcttttgggcgttgataaagctgtgctcctgcgcgatctctcgtacctcagtcttgtgcagcgcacccagcggcaggcggatatgtgccagctgctcctgcgtaaggttatacagcacatagctctgatccttgccctcgtccaagccctttttcagcagccagcggccggtggctgcatcctgctccacccgggcgtagtggccggtaaccacatactccatgccgtgttcttccgcccagtccagcaggtggcggaacttcatatatttattgcagtcgatgcaggggttgggggtaccgcccgcctcgtagacgcggataaatttttcaatgatctgcgcccggaaatcggcggtgaaatccagcacctgatacggcatatccagtgcaaaggccacctcggcggcgtcctcgatatccttttccgagcagcaggtctggtagccggactgtcccagcgtttcgttgtgggtgagccgcatggtgatgccggtgcagtcgtagcctgcctgctgcatcagacaggccgccaccgagctgtccacgccgccgctcatggcaatgagggcgcggggacggtttgcagggttctgtgtggtcataggttctccttttatgggttcaacatactaaagcagtagtataatactaccgcagcataaaccgcttgtcaagacgctataattttctgcgccgcagtcagcagtgccggtttttcgttggggtactctgcgcgtatcacgccgtccagcagcgcttccagcacccggcgcagcgcaggccctgccgggatgcccgccgccatcaggtcgcgtccgttcaccgccagctggcgcacccggcagcatacgccgtcagcctccagctgccgtgcccgctgcgccgcaagggcgcaagccggggcagcttgcgggcgcaacgccgcgcacagcgcacacagccgctccacggtgcacagcccgtatcggcctaaaagccgccgaaggtggatatcactggcgcgttccggggcgtgtgcgggagtttctccgaggaccgtccgctggggtgggaccctgctgccgcaggcagtagggcgggcgatggaatggcccgattcgtgtccgaggagaaagctcccgcacacgccctcccctgccgtttcccgcaccagcacggcggtctcctcgatgcaggcgttggagcagcgcagccgcttgagcacccggcgggtgtcggcctcgcccagagtgcccagcagcgcagcccagcgtaccggcaggttctcctcccccgccgggcaggcatccaccaccggctttgcggcttcaagcgccgccggggtcaactccggcagcaccaccgccagcacggcgggttccagatacgcccccggctgcggggcaaccagcagctttgccagttcctcctgaatgcgctcggcagagatgcagtccaaatgcggtgccagctgccgcgccgcccgggctgtggctgcgtccagcgtaaagccgaatcttgcggcaaagcggtacagccgcaggatgcgcagcgcgtcctcggtaaaccgctgctgcggctcgcccaccgcacgcagcagaccgttttgcaggtctttttgcccgccaaaggggtctaccagcccctcggctgcattatacgccatggcgttgatggtaaaatcccgccgggcaagatcctcccgcacgtccggtacgaactgcaccgcgtccgggtgacggccatcggtatagctgccctcggtgcggaaggtggtagtttcgtacagctgcccgccgtatttgatggtgaccgtgccgtgctgcaaaccggtggggatgcactgctctgtcccgaacagttccatcacctgctgcggcagggcactggtgcacaggtcccagtcgtgggcggtgcgccccaaaaggctgtcccgcacgcagccgcctacggcataggctgcgtagcccgccgcgtgcagggcgtccagcagggcagctgccccggggtcaagtgtcagcttcattcctcgttctcctcgtaatgcagggtgatgcgtttgccgtcaaagccgcattctgccgccgggaagatgctttgcgcctgtgcaagatgctcctccgggtcggtgaccatgggggaatagtgcaccagccacagccgctttgccccggcttttgccgccagcgctgcgctttggccaaaggtgctgtgcccccactgcgcggcctgctcctgctgctccggcagggcataggtggcatcgcagagcagcaggtctgccccctgcgccgcctgttccagcgccgggcagggcgcactgtcgccggaaaagacgaaccgcaaccccttgcggggcgcgcccagcacctcggcgggctgcaccatacgctctgccagcgggacagcctgtccccgctgcaaaagccgccactgggtcaccggtacgcccagtgcccgcgccttttccgggtcgaacctgcccgcccggggcaagtccagccgatagcccagactgcgcacccggtgctttgttgccaccggcagcagcgttgccccggcgggccatccagccgaaagagcatccagcgccacaggctgcccggcgcggcagaccagcggttttaccgcgtagggcagcggcccggtcagagcatacaccgcccgccagacctccaaaagcccctccggccccagcagcaccagcgaacgggtgcgcccctgcgccccaagggtctgcaaaagcccgggcagaccaaaaatatgatccccgtggtagtgggtcagacagatggcgtccgcgcgcatcaggttcaccccggcgcggcgggcagcggtctgggtgccctcgccgcagtccagcagcaggctgtgcccgccgcactccgccaccgcggcggtcagggcgcgctccggcagcggcatggtggcagccgtgcccagcagtgtaatggtcagcataagcagttcctccgtggttctttcctgttatcttaccacaaaccccgcttgtgcacaattctttctgccgcagcataagctgggcaaagccttgaaaaaggagggcgcagcctatgcagcgtgaccgcagaaagcgctattcccccgcccggcatccggtgcttttgcgcagggtgcttttggtgctgtgcattctggcggtgctgtggctggggtacagctgcatgatgccacagctgcttttttctgcccggggcaccatgatttttgtgccagacccgccactgcgggggtagcgggaaaaattttcatttcatgaatcaccagacgcaaaaacagggctgctgcacgttactttgtgcagcagccctgtttccaatttataaactttccaatacctttttcccggtcagcgggtcggggatgcccagcagcgccagtataatggccatgcggatatacacaccgttatgcacctgatcgaaataagcggcgcgggggtcgttgtccacgtccggcttgatctcgtcgatgcgggggagcggatgcagcaccggcatggtgggcggtgccagctgcagcagcttttcgtccagcgcatagcagcctttcaaccgcagatagtcctcttcgttgaaaaagcgctcctgctggatgcgggtcatgtacagtacgtccagcccgggcaactcggcctcaaggtcggcggtctctttatagttctggtgcagcggagtcagggtctcgtccttgacgtactgcgggatgcgcagttcctcgggcgagatgaacacgaaccggttgccctcgaactggctcagcgcggcggtgagggagtgcaccgtccggccgaacttgaggtcgccgcagaagccgatggtcaaatgatccagccgccccttgcgctggcggatggtcatcaggtcaatcatggtctgggaggggtgggcgtggccgccatcgcctgcattgatgacgggcacccgcgcatacatggacgcccgcaacggtgcgccctccttggggtggcgcatggcaatgacgtctgcatagttgctcaccacacgggcagtatcggccaccgtttcgcccttgctggcgctggaaagctgcgccccggcaaagcccagcgtcttgccgcccagccgcagcatggcggactcgaaggaaaggcgggtgcgggtgctgggctcgtagaacagggtggccagaatgcggccgtcacacaggtgggcgtagggcgcggggtcagcctccatccggtcggcaaggtcgagcagtgccagctgctcggccagagaaaagctgccgggctcaataaaatgtctcacagccattctcccttcagcacaaacttttcgcgctcggcgccggtggaaacaaactggatctcgtgccccagctgcttttcaaggaactccacataggccttggcttccttgggcagctccgtccagctgcggcagccggagatatccttgttccagccgggcagcagcgtgaccaccggctgcacacggtcaaggtcggacagggtgtcgaagcgggggacttccacgccgtccagcttgtaaccggtgatgaccgggatctgcttcatgctgctcagcacgtccagcttggtcagtgcgatcttatccgcgccctgacattgcaggccgtagcggctggcaacgcagtcaaaggggcctacccggcggggacgtccggtggccgcgccgtactcgccgccggccttgcgcagcttttcgttccacgcttcgcccattgcattctctgctgcaaaggggcctgcgcccacgcaggtggagtaggctttcagcacgcccaccacatggtccagcttgcagttggggatgcccgcacccagcggcgcgtaggccgccagcgtgttagagctggaagtgaacgggaagatgccgtagtcgatatcccgcattgcgcccagctgcgcttccagcacgatgcgcttgccgctatcgtgcgcctgctgcaagaaagcgcctacatcacagatgaagggcgcaaagtacgctgcctgctgcctgcaccagttcagcagggcatcgtagctcatgggctcctgatgatagcagcctgccagctccatgttcttggcgtccaggatcatgtgcaggcggttctgggtgcgctcctcgtccagatgcaaaaggtcacccagccgcagggtctttttgcggtacttgtcgctgtaagcgtaggcaatgccgcgccgggtagagccgaacgcgccgccctttttggcaaggcggtcctcttccagcccatcctgtaccttgtgccacggcatggagatggtagctttatcggagagcttcaggttctccggctccacctttacgccgcgcgcttcaatggcctccatctctccggccagatgctcgaggtcgatcaccataccggtgcccagcacgcaggtcacctccgggtgcaggatgccggagggcagcaggttcaggatgaacttgcccttctcggtcacaacggtatgaccggcattgttgccgccctgatagcgcgcaacgatatcggcattttcggccagcaggtcgatgacgcggcccttgccctcatcgccccagttgattccagtaacagcggtcagcataaacttcatttaccttcttttcattcttgtttcctgttcgcggtgtctattatacgagcgtgcagagaatatgtaaaaagtatcctgtgtatagcagcaatatgttttttacattgcagaggctgctgcccgcatccggcacagccaagccgtaaaaagcgcttgcaattccggcgcgccgtgctatgatacaagaagagcataaagccgcttctgccgctggccgcgccggaagcccgacaggaaagagggccgcacctatgtatgtggactgggaatactacaaaatcttttactatgtggcaaagtatcagaactttacccgcgcggcgcgggtgctgggcaataatcagcccaacatcacccacgccatgaaccggctggaaagccagctgaactgcgtgctgttcatccgctccaaccggggcgtcaccttaacgccggagggagagctgctgtattcccgcattgcctcagcagcggtgcagatacaggatgccgaggaggaactgagcgccaccgccacgctggagcacggtgccatcagcatcagcaccaccgagaccgctttgaacatctacctgtccgaaaagctgcgcgctttccatacagagtacccgggcatccggctgcgcatctccaaccactccactccgcaggcggtgcaggcggtacgcaacggcgaggtagattttgccatcgtgaccacccccgcagaggtggaaaacgggctgaaaatggtagagctgatgcccttttatgaagtccttgtgggcggaaagacctttacggcgctggccagccagaccctgagcctgaaggaactggccggttatcccctgatctgcctgaacgaggagagcatgacccgcagcttttaccggcaattctttctggaacatgacgcagtgctgaaacctgacaccgaggccgccaccaccgaccagatgctcacgctggtcaaaagcgagttgggactggcctttatgccagagcccatggcagcacccctgctggccagcggagagctggtacagctgcacttgcaggagatcatcccctcccgctccatctgccttgtctacgaccatcaccgcccgctgaacaccgccgcccgcaagttccagcagctgctgaccaaagccggggctcggagcacggaacacaaataaagccaatacagcaaggggctgctgcacgtcattggtgcagcagccccttttttgttatttccgggcgctctgcgtcagctcccgctgctcctcctgcagttcctgcttcagggttcggtcgatctcccgggtctcctgccggatggcggtcaggtctttttcgatgaccgggttctcttccagttcctcccggatgaacatcagcgtaaagctgaccagcaaaaagcaacaggagagccagatggctctgccgcccagctgcgccgcgctcttgctgcccagccctgcccccaacgcgaacaggaatatgatgccgaagtagcgcaccatcctatcctttgcgtggggttcatgggacttgcgccagatgcaaaaggcctccacgccgctgcgcaggtcgccgatgcacatggtactggcaaaggcgtagccgttcaccttgcggaaagcctgcacctgcatggcgcaggaaaaagaaacgatggcgttggccagcaggttctgcgattgcggcagaaagcccaccgcgaacagcagcagcacctcgcccagcaccaccagctgccgccagtgcagccgctgcatcgcctgaaagtgctcccgcattttttccgcagccagaacccccagcgcaaaggcgcacaacggcaccagatagtgcagcaccttatcccaccggccatccatgatattggtgctcagcagcacgatattgccggtctgggcattggcaaacaccttgccccggaacagataggtgtaggcatcctgcaagccgccggacagcgaaaggaacaccgccgtaagaaaggactcggacatttgcccgtgatgctttgttttcatacttgtaccctcttttcgggctctattataatacattttgcagcagtttctgatatcatttttacataccggctatgttttccgctccaaaaggcacaaaaagcgcgggtgtccttccctatttcaccgcaatctgttagaatagggaaagagaatattgcatacaggaaggagctcttattatgaagatcgcaattccctacgaaaacggtcaggtgttccagcacttcggccactctgcgcagttcaagctgtacaccgccgaggagggccgcattaccggtgccgaggtggtctccaccgacgggcagggccacggtgcactggtgggctttctggtgcgcaacggcgtgaacgtgctgctgtgcggcggcattggcggcggggcacagatggcgctggcacaggccggtatccggctgtgcggcggcattaccggcgacgccgacagcgctgcggcggcttatcttgccggcacgctggtctttgaccccaacgcccgctgcacccaccacgaccacgaggagagccacagctgcggctctcatgcctgccacgccgacaagggcggctgcaccggtagctgccactaaaggccgctcccctttccgggcgggacgattttgaatgccctccgcttgcgctctgggcataagctaaggaaaaaatatttataatttcggaataccggagcgtctgcggacgctccggtattccattttcacaggcgggtcgtggctgaaaacggcattcgcagcgccgctttctgcgaaagcgcggcgctgcgggtcagcgtgctaaattttctttactgaaatcaaaagctttgcaccatcctgagaagagtgctcctttcccgtgaaaaaggggctcaggaaagtccgcgtttgcgcagcaataaaagccccagtgaggcttttaagcggcagagcggtctgcgcaagcagatggaggggctttgccccgacaagctccgcagactttcctgagccccaaattaagaataatttttccgctgactatgcgcaaagcagcgcggcgcgcatttcaaatggtttttcaggccttctcgatggtgatgctccactcgctggtcatggcctcgtccggctccaacacctcgtgcttgccgtcctcgttcacgctgtttgcccagccattccaaggctccatgcagacgaagctctcggcatcctgctgccacagcacgccgttttcaaaggtctcgtcggcgtccacggtcaccttatggccgttgcccttgtcggtcagggtcatggggaactgcacgccggtcagcagacggacagagttgtctgcgccctccttgcgggtgagggtgatcttttccggggcggcgggctgctcgcccttggcgttgtcggagcaggtagcgcacttgatgtcgaactccacgttctccagcttggaagcggtaaagtaggggtggtagccaaagctgaaaggcatatccgtgctgccctcgttgatgacggtcaggctgaccagtgccttgttgccctccagattatagttgagcagcagggtgaaatcaaacggatagaggaacttggtcagcggggtggactccagtgccagcgtcacgccgtccgggccaacactgtccacttcccatgcgcacaggtcggcaaagccgtgggtctccatggggtaagccttgccgtcaaagatgtgcacgccgttatccgggttgccgcagctggggaacagcaccggcacgccaaagcggggacggttgcactccgagaaattggggcggcgggtccagacgaactcctcgccgtccagcgtaaagctggtgatcataccgccgcgctccggggtgatggtgagggcggtctttgcctcggggtcggtgatgacgtactgctcgtagcaggcgccgttctcggtgatgtaccgggtggtgatctgattcataagtaaaagcctcctattattaccgcagggtcgccccggcgggtcattccttgtgctcggtctgctccggctgctgttccaacttctggaagtagtaatcaatgccgtagcggataaaatatttgatcaatcgtactgcaccataaatgatagccgcataaagcagcagtgtcaacagcagcactccatttacgcccaacattccatacacttcccttctttttatgcacaaaaaggccgccgtaccgctttttgccgtacagcagccctttttcagttacagaaccacgccgtccttgaagatggagatctcgcggaagccgtgcttttccgccttggtctgctcaccgctggccacgcggatgaccagattcagcagatcctttgcagcctcgtcgatggtcttttcaccgtctgcaatgacaccggtgttgaaatcgatccagccgcccttcttctctgccagcggggtgttggtggagatcttcagggtgggagccggagcggagaacggggtgccgcggccggtggagaacaggatcaggtgtgcgcctgctgccgtcatggcggtggcggaaaccagatcgttgccggggccgtacagcatattcaggcccttggtcaccacggggtcgccgtagccgatgacgtccataatgggagcagtgccgcccttctgcacgcagccgcagctcttatcctccagcgtggtgatgccgccggccttgttgcccggagaggggttatcgtacaccacctcgttgtggctgatgaagtattccttgaagccgttgatcatgtgctcggccttgacgaacacttccttattgatgcagcggtccatcaggaagccctctgcaccgaacatctcgggcacctcggtcagcacggtagagccgccgcgctggcccatcatgtcggagaagcggccgatggtggggttggcggtgatgccggacaagccgtccgagccgccgcacttcatgcccaccaccagctcagacacggggatgggctggcgctcaaactgcccggcgtaggcagccagctccttcaggatatcgcgggcggcggcaaactcgtcctccacgtcctgacaggtcaggaacttgacgcggtcgtggtcgtactcgcccagctcttccacgaactgatcgtgctgcaggttctcgcagcccagatgcagcaccagaacggcagcggcattggggtggcgcaccagcgcagccagcagcttgcgggtctgtgcgtggtcgtggccggtctggctgcagccgaagggatgggtgaaggtgtacagaccctcgatggagccggtgaccagatcctgattgtcggcaacgatcttcttggcgatatcgttcacgcagcccacggtggggatgatccagatctcgttgcggatggcggcgcggccgtccttacggcggaagcccataaaggtctccggctcgaccttaggcagcggagccagatccggggcggggttatagctgtactccacctcgccggacaggttggtgtgcacattatgggtgtgcatccaagtgccgggggcggcgtctgcggtggcatgaccgatggggaagccgtacttgatgacgttctcgccgttcttaatgggcttgactgccatcttgtgaccctgcgggatatcctccagtgcggtgacggcaaggccgtccacctccaccagagtgcccttggcaatggggtgcagggcaacgaccacattgtcgatggggctgatatgaattgcctgcggcatagttgttctccttatcgtatcgcacaaaagggctgctgcccaaagcagcagccctttgttgtgcgggtaggttgatttttcagcttacaggcagctcttgtaagcagcctcggcaccctgggtgcggatcatttccagatctgccagcacagcagcttccagaccctcgatcttggtcagatcctgatcccacatctgggtgttggtcagcacagcgtgcaccagctgagcagcggtgtcgtccttgtgtgcatagtagaaatccagagcccatgcgtcgtcctggatcttgtaggtgttgcctgcggggcgcttgcagatcaggccgtcagcggtgcgctcctgaatatcgttggagtagaaggcgatgtaggctgccagagacatggtcaggcacttgggcagctgcttctgctcctcgatgtaagcgaggaaggagggcatattgcgagccttccacttggaggtggagttcagggagatgctcatcagctcgtggttgacgaaggggttgttgaagcgatcctcaacagcagaggcaaagtcctccagatccttcttgtccaacggcagggtggggatgatctcctcgtgcagcatcttgttcataaagccgcgcacggtgtcgttgtgcatgcagtcgcgcacgatatcaaagcctgccagataagcgcccagcacaaagccggtgtgtgcaccgttcaggatgcggaccttgcgcttcttgtagggggtaacgtcgggcacgaccatgacgttgacgccggccttcttgaacggcagcttgtcctccagacctgcggggccctcgatgacccagacgccgaacacttcgcccacgtccagagcagcatcgtggtagccgttggcctcttccagagcagccagctcctgcgggtcacggatgcggcccggaacgatgcggtccaccagagtggagcagaaggtgttggcggtgttcatccagtcgatgaaagcgggctccagatcccaatccttagcgtagttgttgcagcacttctgcagctccttgccgttgttgtcgatcagctcgcagctcaggatgaccagacccttatcggcagcgccgttgaaggccttgtagcgctcgaacagcacgcgggtcagctttgcggggaagctgttggggggaacctgatcgaactggctgtcgcccttggtgtaggcaatgccggcctcggtggtattggatacaacagtttccagatcctcagagcgagccaaagccagaacttcgtcccacttgccatcgatgtaggggcacacgcagtcagacacgcaggagatcacccgctttgcgtccaccttctggcccttttcgctgccgcgcaggtacagggtgtacagaccctcctgctcgttgatccagtctgccatctgggggaagttgccgatgggctgcaccagcttgaccttgccgttgtagccggccttctcgtttgcaatatcgtagaaataatccacgaaagcgcgcaggaagttgccctcgccgaactgcatcaccttaacgggagcatccttcaggatgtagccgttgtagccagtgccttccagaaccttgtagttcaaagtttccatcttattgatctcctttataaacttgctttgcatggcaggctctcgttttccctgccatcttctgctcctattttatgctgttgtatacaaagaagtcaagtgttttgtgcaatgtttttagtccaaaaatggccattcagcgcatttccagcggtttgtacaattccaagggtgaaattttggcagtttttcagttgtatacatcggcgttttccggtatactaaggataaggcagcctgcccgttccaagcaggtgcaatttcatgcccgtttttgtctaaattttaacaaattcatcagagaaaaggagttaaaatcccatgaaagcatttatggataaggacttcatgctccagtctgctaccgcacagcatctgtatcacgactatgcagctgctatgcccatctgcgactatcactgccatattcctccccgcgagatctacgagaaccgccgcttcgagaacattactcaggtgtggctgggcggccgtaacccggacggcagctacttcggcgatcattataagtggcgcgtgatgcgttccaacggcgtgcccgaggagtacatcaccggtgataagcccgaccgcgagcgcttccagaagtttgccgaggctctgcccatggccatcggcaatcccatgtaccactggaccaatctggaactgcacgttttcttcggctacgacggcgtgctgaacggcgacaccgctgaggaagtgtggaacctgtgcaacgacaagctgcagcacgatcccaaactgaccgtccgcggcctgatcgagcagagcaacgtggccttcatcggcaccaccgatgaccccatcgacgacctgtactggcacaagaagatcaaggaggatcccaccatcaagttcaccgtggctccctccttccgcccggataaggccctcaacatcaacaagcccggctttgctgagtacatggcaaagctggctgccgttgtgggcaaggaaaagctggcctgcatcgactgcgtgaccgatgccctgaccaagcgcatcgagttctttgccgagatgggctgccgcgcttccgaccatggtctggattatgttccctaccgtgaggccaccaaggacgaggtgaacgccatctaccagaaggtgatgaagggcgagagctgcaccgtggaagaggctgagaagtaccagacctacatcctgatccatctgggcaagcagtaccatcgtctgggcattgccatgcagatccactacaactgcctgcgcggcgtgaaccgcaagatgaacagcctgctgggccccgacaccggctttgacatgatcaacaccgccacctgcggcggcgagatcgcacagctgctcagcgccctgaacgataccgatgagtgccccaagaccatcatttacagcctgaaccccgccgacgatgcacagatcggcaccattctgggctgcttccagaacagcgaggtgccgggcaagatccagcacggttctgcatggtggttcaatgaccacaagatcggcatggaggatcagatgatccgtctggcaagccttggcctgctgggcaactttgtgggtatgctgaccgacagccgcagcttcctgagctacacccgtcacgattacttccgccgcatcctgtgcaacatcatcggccagtgggtcgaggacggcgagtatcccaacgacgagaaggctctggagaagatcgtcaagggcatctgcttcgacaacgcaaagcgttacttcaacctgtaagcgctttccccttttcctgaactgaatctccgcgccgcccgcagacaatgccgtctgcgggcggcgctttgttttgcccttttacgtccaaaatgcaccgggcattcctgttttttcaccttttatcggttgttttccgtctttttctacaacttctccgttatcccttgacttccccgtataaggagagtatatttttgcatggcattcaggccatattactgtattttttgatggaggaaacccatgaacggtttaaaagaagccttcagccgcgagaatctgctgaaggatctaaatttctttgccctgttgaacctcggtcttgtgcttacggcagtgggcatcgtatattttaaaaatcccaaccactttgctttcggcggcacctccggcctgtccatcctgctggcagacctgttcccccgcatcaacgtgggcggctttatgtggatcatcaacatcgtgctggtggtgctgggctttatctttttgggcgtcaagtgcatgggctggacgatctactcctcctttgcgctctcctttttcgtgtccggctgcgagtggctgtacccctccggcgtgtccctgagcggcgacgccatgctggatctggtgttcgcggtgttcctgcccgcgctgggcgctgccatcgtgtttgacatcggtgcctccaccggcggcaccgacatcgtggcgctgatccttgccaagtacacctccatggagatcggcaaggcgctgatggtcagcgatatcctcatcgtgctggcggccgccgtgcggttcggcatgggcaccggcctgtactgtatccttggcctcattggcaagtcctttgtggtggacggtgccattgaaaacatccgcctgcgcaaggtgtgcaccattatgactgcgaacccgcagcccattctggacttcatcatccacgatatgaaccgctctgccactgtggaaaaggcctacggtgcctacacccaccacgagctcagcgtgctggtgaccgtgcttacccgccgtcaggctttgcagctgcgcaacttcctgcgggagaacgacccgcacagctttatcaccatcgtcaactccagcgagatcatcggtaagggcttccgctccttcaactaagaccgctttgtatccttttttcatccattttccactaaaggcttcccccgaccgggggaagcctttagtcagcggattgcccccgtgttccgtgcaactccgtacttgaagaaaaacgcaaaatagtgtattatatagtattatgagtaaaagggggcacgctgtgccctgacagggggaacctatatggctgataaaaactttctgacagatatcatcgatgccgaccttgccgagggcaaggtgcagcagatccacacccgcttcccgccggagcccaacggctatctgcacatcggcagcgccaaggccatttatatcaactggtccattgccaaccagtacggcggcaaattcaacctgcgtctggacgacaccaaccccgcccgcgaaggcgaggagtatgtcaacagtatcatcgaggatctgcactggctgggtgccgaccccaacggcggcatcttctacggcagcgattactttgataagtgctacgagtacgccgagaagctcatcaccgagggcaaggcttatgtagacgatttgacccgcgaggagatgcgcgagtaccgcggctccgatgccggcaagccctcccgcccctctccgtggcgcgaccgcagcccggaagagaacctcgacctgttccgccggatgcgtgccggtgagttcaaggagggcgaaaagaccctgcgtgccaagatcgatctggcaagccccaacatgaatatgcgtgacccggccatctaccgcatcaagtacgccgagcatcaccgtcagggcaacaagtggtgcatctaccccatgtacgacttcgcccaccccattcaggacgccatcgagggcatcacccacagcatgtgcagtctggagttcgagaaccaccgcccgctgtacaactgggtcatcgagaacattttcggtgccgagttccccaagcagcgcgagttcgcccgcctgaacatgaccaacacggtcatgagcaagcgctacctgcgcgagctggtggagatgggcatcgtggacggctgggacgatccccgtatgcccaccctgtgcggtctgcgccgccgcggctacacccccacctccatcttcacctttgtgcgggaggccggcatctccaagtctgacaacctgatcgatatgcgtcagctggaagcctgcatccgcagcgagctggacctgaccgcacagcgccgcattgccgtgctggagccggtcaagctggtggtggacaactaccctgccgacaagaccgaatactttgacgtggccaacaaccccaaccgcgaagccaacgataccaccacccgcaaggtggcctttacccgcgagctgtggatcgatgccgaggactttgccgaggttccgcctcccaagttcaagcgcctgaccgtggacggcgaggtacgcctgatgggtgcttatatcgtcaagtgcaccggcgtggacaagaacgccgacggcagcatcgccgccatccactgcaccgccgacctggagaccggcaacggcaaccccgctgacggccgcaaggtcaagggcaccatccactgggtaagcgccgcacactgcgtggacgccgaggtgcgcctgtacgacaagctgttcaccgaggccaacatgaacgccatccccgagggcagtgactacaaggactacctgaacccggaaagcgtcaccgtgcgcaccggctgcaagctggaagagagcctgaaggacgcaaagcccggcgaaaagttccagttcgtgcgcaccggcttctttaccccggacagcaagaaccccggcgtgtacaaccgggtagtcaccctgcgcgacagcttcaagcccgcaaaataatcatccccaaggagaagataccataccatgaccgcaaaaatgacccgtaatatcctgctcatgctggtggccaccgtgctgatgggcattgtgctgaacctgtatatccacaacaccggcaccgtacccgccgccgacaacgccgctcccctgaccgatggcagctacacctcctctgcgcagggttgcctgagtgaagtgaccgtcacggtcaccgtgaccggcggcaaggtgaccgccgtacaggtggacgcctctgccgagaccccggagctgggcggcaaagctgccgagacgctggctgcccagctgacacagaccggctccaccgccggtgtggacgccatcaccggttccaccatgaccagcgaagccatctttaccgccatggacgcctgccttgcacaggcgcagtgatgctgtaaactacaaaaacaaaaactgccgcacaattgtgcggcagtttttgttttttacagggtgctttgcagccgtgcgccgctggcgtactgggtacggcggtccatctggttatccagcggctgaccggcggcatagcgcttgaggttgtgcacaaagatatccacgatgttgtccagcgtcttgggcaggctgaagccgccggtgacatggggcgtgatgatcacgttcggctccgcccacaggggatgctccggcggcagcggctcggggtcggtcacgtccagccctgcaccggaaagccgcccgctgtgcacggcggctgccagcgcctcgccgtccacggcagtgccgcgtcccacattgagcaggatagcaccgggcttgcagagcgccagccgctctgcgccgaacagatgcagtgtctccggcgtaccgggcaggctcagtgccacaaggtcggcctgcggcagctccgcgtccagtgcgctctgcgccaccacccgggtgcagtagtccgggcagggggtatccgggtgcacggtgcggcgcacgcctaccacctcagcacccagcgcatgcgcccgccgggcaaagttcgagccgatatcgcccatgcccacgcacagcacccggctgcccgcaatgctgcccacagagtggccagtgggtgcccagcggtgctcccgctggttgtcccggtaggtgggcagctccttgagcaggctgagccacattgccagcatacactcgctgatggccagaccgtaagcaccggtggcgttggtcacgatgcagccctccggcagcacccccggctccagatagttattggggccagctgcgttggactgaaaccactccagatggtcgttctgccggatcagcggcaccggcagattacccagcacggcatctgcccacagggcatcctccaccgtggcagtatccggggtggtaaagcgatatgcaaagccctgcaccgcctcaatgcgggtcctctgctctgaactgatgggcaggcagacaaggatatgtttggacataatgggatctccttccctcttttttgtctatcataccgcaaaccgtgcggcggcacaagggggcggttctgtgctttcagacgcatcccgtaaaagaacaatgccgggcagcccgaaagccgcccggcaccgcattctattttagtccagtgcacggatggcgtccatcgtgcattgatactgctctgccacctttgcaaactgctcccgtgtgccctccagctgcccggcgcgcagggtctctgtcagggtataggtgggcgcgtacagatttgaaaaacccagattctggcagacgcccttgagggtatgcgccccacggaatgcctcttttacgtctcccctgcgcagcgcttcctccaggatctgaaagctgtcgtcctgcaaaaacatccgcacgaatttgccgatcatggcttcgttgtgcagccgccccagcacctcctgatagtctgcgcccatctttttatagcattcctgtatcgtcatcgcttacgccgtgcctttcttttcagcctctgtctaattcccaccgccgcacttcccggcgatatagtgttatgatagcacctttccggcttgcttgcaactagagcgcaacaaattttgtgttctgtccagtttttgcatccgcttttcggcagttgcaccaaaacctcacctttttgcaaaagacgcctgtcatcgcccgcttcctcactgctgcttttattggttgaaaaagtcgaaaagcaccgatgcccctaactgcggattctgtattgacgaaccgcgcaaaaaacgatatactatattctggcggtgcagctgtgccgccagatgtcggggtgttgcgcagttggtagcgcgcctgctttgggagcaggaggccgcgagttcgagtctcgccactccgatcctgcaaacgcacgttgattcggtaaggatcagcgtgcgtttttgttttgcttgtgaaactgccgggaggatatctgaaagcgcgcaaaaactgcgcacactgcaagaccgttttccaaaaacagagcagcctttttctatttcctccccttttgcgggattgataaaagcccacaagtgcggtatactgaatagtactttattcgagcgaagtaaggaggtgcagtacatggcgatcggtgtaccacgcccactggccttggaaaagccgcagagtgtcgatctggcgcaggcggcgcggtatttcggcgcgcacggcgagccggacgctgccacgctggcgctgctgcaaaagtgcgcggtgccgctgctggcagtggcgatgccccaggcggtgtggctgctggcagacacccccgccctgaccgaggccgggcttctgcccggcgaggacgtgcacaagcacctgaccggctgcgggcaggccattctgctggcagtgacgctgggccccggggtggatgcccagatccgccgggcaggcgtgggcgacattgccgccggggtagcctccgatgccttgggcagcgcactggccgagcaggccgccgatgccgccgaggcgcagctgcgccagtgggcggcgaccgagggaaagtatctgaccgggcgcttttcgcccggctacggcgattgggacatcgcggtgcagccgctggtggcagcggcgctggacaccgtgcgcaaggccgggctgtgcgtcaccgacaccaacctgatgaccccgcgcaagagcgtgaccgccctgctgggggtcagcgaccacccggtaaaggggcaactggccgggtgcggccattgtgtgctgcgcacccgctgcgaatacagaaagaggggaaagacctgtgcaagtgaatgaacttttcagacagagcaataccatcctgctggacggcggcatgggcaccatgctgcaagctgccgggctcaagctgggcgcacgcccggaggagctgaacatcaccgatccggcgctcatcgagggcatccatgggcagtacgctgcggcgggcagccgcatcgtcaacgccaacaccttcggcgcttctgcccacaagctggcaggcagtgcttacacgctggagcaggtcatcaccgcaggcattgaaaactgcaagcgcgcctgtgcgccctacggtgcgctgaccgcgctggacgtaggcccgctgggcgagctgctggagcccagcggaacgctggcctttgaggatgctgtggccgagtatgcccgcatcgtcaaggcaggcgaagccgccggggcagacctgatcttttttgagacctataccgacctgtacgagttgaaggccgccctgctggctgccaaggagaatactcatctgcccattctggccagcatgagctttgaagcgggcgggcgcacctttaccggctgcacagtggaaagctttgccgccaccgcccggggcttgggggcagacgccgtgggcatcaactgctcgctgggacccaaagagatcttccccatggcaaagcggctggccgaggctgtacccggcaacttcccggtgttcgtcaagcccaacgccggtctgccccgggcagacggcagcggctacgacatcaccccgcagctgttcgccttgcagatgaagccctaccgggagctgcacctgtttgccgccggcggctgctgcggcaccaccccggagttcatcaagctgctcaacggcacctttgcaggctgcaccccggggcgtcccgcgcaccggatgccctcagtgctgtgcaccccggtggacacggtcacggtagacggcatcacggtggtgggcgagcgcatcaaccccaccggcaaaaagcgcttccagcaggcactgcgggaaggcgacatgaactatgtgctggaacaggccgtcagtcaggcagaggctggggcgcagatcttggacgtgaacgtgggcgcgcccggcgtggacgagccggtgctgatggagcaggtggtcaaggcgctgcaaagcgtgaccagtttgcctttgcagctggactcctccaacgtggaggcgctggcgcggggtctgcgggtgtacaacggcaagcccatcgtcaactccaccaacggcgagccggaaaagcttgccgccatcctgccgctgtgcaagaagtacggtgccgccatcgtgggactggccatcgatgaaaaaggcatccagcccaaagccgcagaccgcgtggccattgcccgccgcatcaccgaggcagcgctggcagcaggcatccctcgggaagatatctacatcgactgccttaccctgaccgccagcgcccagcaggaggatgtgctggccacggtgcaggcactggaagcctgcaaaaaggagctgggagtgcgcaccgtgctgggcgtgtccaacatcagctttggtctgccatgccgcacctacctgaacaccacctttttgaccatggccatgtacgccgggctggaccttgccatcatgaacccctccagcgaggagatgatggcggcggtgtacgcctacaacgtgctgaccaaccgggacaagcagagcacaaagtacatcgagcgctttgccgaccgtgtgcctgccagcaccgcgctggcacaggctgcaaaagccgtgcctgccgccagtgccaccgaagcagaacttaccggcccctacgccgccctgatgaaagcggtggaaaagggcttgaagggtgacgccgccgcccatacccgcgccctgctggcagaaaagcagccgctggaggtggtggacgaagccttgatccccgctttggacatcgtgggtgccaagtatgaaaaaggcactctgttcctgccgcagctgctgcaggctgccagcgccgcccagagcgcttttgaggagatcaagaccgccattgcccaaaagggcgagggcagcgccagcaagggacgcatcgtccttgccaccgtcaagggcgatgtgcacgacattggcaagaacatcgtccgggtcattctggaaaactacggttttgaggtactggatcttggccgggacgtaccggtggagacggtggtggacaccgtgcgggaaaaggacgtgcatctggtaggcctttcggcgctgatgaccaccaccctgaaaagcatggaggagaccatcgccgccctgcacgccgctaagctcgactgcaagatcatggtgggcggtgccgtgctgaccccggaatacgctgagaagatcggcgcggactggtacgccaaggacgccaagcgcagcgccgacatcgccaaggagttctttggggtgtaacgcaaaaaaattacagattcagactgctgagaagcgcggacttttcagcagtcttttttataggcagggcgtttatcgcaattttcaaaaacagtgcctgtcaaaacggcatatttgcgatatgcagtttgcggatgttgctcggacattataaacgcaaactgcaatatttgcaaactgttcaaatttaccacaaagaattgccacgattgtctggcataataagggtgcactcagggagaacggaacggacatcccccataacctcccaaaggttctccccgcaaaagcccatgcaggcatatttccctgcgggtgcggccgcagcagcggtgcacagcaggcccataaaaaactgtctcccgtttctatgcgaggcaatagccagaacggcggacagactaccaaatccctcctgatcaagccgcaatgttcaggggttcctatacagcaggcagtgtcgctttcctcctcctttccacgacactgcctgctttttgtttgcgctgtttcaaatcggctaccgggctaaccttaccacaagccacatgatactgttccggggcgtgcagtacgatattgtccacatcgacccgttcgagggctacaaggcagacttgaagctgtattgcaagcgaaaaaacaaatgaaatggcggcaaactccaaaagcctgccgccgtttttgttattttataaactcatattcaaaaagcactgggacgatttcagaattgtaatagtctttgacaagcgttttcaagcccgcaagagcagtatgcaattccacgttatcccaaattgtattgcccgtcgtttcgtcaacgtgcgatgtatccagttcagcgtaaatctgatatacaccatatgtcaaagaagggctatagttttctgctttctttgcccattgcagaaccgtttcccattgattcaaaatagccttttccctatcaccggggataagcccctttatatcgcgcagggcgattgtttttccgttcgtaccgtcaaggcaaagttcatcgcgataaaaccgcccatcgctccccgtgaatgtgcgcatatgattctgcatttctgtacaggtgaaaagcaggcatttcaagaggaattgcgcaagtttaccacttgcaacgtccgcattgtatctgtccgcgccgtccgccgacttcataatgcgggcacgttccgtccatgctctgttatatgtaatatagcgtgaagcgcaaaacataggaagtttttcaagatagttatctttacgcaggaaaaagccgtttccatcatagcgagccgctatcaaaaggctagaatccaagtctgggttatcaaatcccgaactgtgtgcgaccatatatcccattatatcgggtgcggttgcgggcttgtttcgttgtttgccgcctaccttttcaagaccatttaaccctgcaagaatacccgtccgctgctcatctggtatagggcgtttgtcataatatattttgctgtatgttgtaaagacctgttttacagggagcagtccacacgaaaccaacgtgcctgtgttatcgtctatatcataagccgctatttcaatttcctttctgctgtcagctatattttgccaatatgcgcacataatgcaagcgtcaatattagtgtgaaaatggcggcgattgtatgcaaatcctttgacaaatttcctgtcaattaaatgttgcgctttccaatacttgacaggagaatacactatatagctatctgttggttgccgcaaataatatttaaaaccagaccaaatgaaaacgtttcctaaatcgttggacgctgttcctttgacttcttttttcatttcagttactacatagctttgtttccaagtagatgattttttgctttgtccctgtcgttggtgttcggcagaagttgtttctgcatacggtggattttcaaacaatataatcgtgcattgtgggttggcaatgtattgctttatgaccggattttctatatattctttgcttaaagcgtctgcgcccgaaactagcccggcgttaaatgtgtctgtcatttcaataggcgggataatgtgccgaacctttgcccctaacaattcttgaagtaccttgtactcataatattctactgttgaaacaacacaatgtgaaagttcctcgtctgtcaaacctgcttcaaggtttcctgttccggcgcacctgtcaagaatgatatagtcatttccggtgggaacacaggcgattgcagcccgcaccaattcaagggacttttcggcatacagcttgtgcgtgtaaaatgcccccaagttctttttctgaagcgtgtcatttagcttatccatcaaataattaaatttgacatttgtttgcccggtataagggtaaatgtaccgttcaaaatgaacgggttttctaatttcttctgctatttttcagtgtcttattgcagatttaagcgacaaataagcgacaagccacaaggtacggtgtcaagatattcgaagaaagtacaaaatatagtattaaaatcaaagaaacagccctgtatttggtatcgaaatcaaatacagggctgttgagatatactctttttcagaagttcgatgtacacggaacccgtcttgctcccgaattgattgaccagttcgttgaagtgatcaccccattgccgattactcctaccgctggaagctgaacaccggctgtaagaagtccaaagggaagaaatctcctcccagcagacagaacccctccacattctcccctgtcctgtgcagcaacagccttctggattgcagggtgagcagctgtgccgggttatccgggcagcaaatttctgtccgttccgcgctctttggtgcttccagttcccaacagggcttgctttcgccccagcattcccggccgtcgcgcagcagtgtcaggttcagcatcagggtctcgtacagattgtcgccctgtgcctgaataaaggagaacacggtgaacagcaccgccagcagccgccgcagcacggcggcgttctgggtgggcatctcgcccgcaaggtccacataatcctgcgccgacaccagcgcctcggtcagggacacctcccgcaccgtgttgtcccgcagccgcacccgtatccacggttcggtcagcaggttgaattcaatttccttcatccgtctcctccttttggtaatacaggccgttttcacggtcataacaaagttccatgcccgcaagccgggcagtcaggttttcatccagcagcaggatcagttctccgtgcagcagcggcgacagctgccacgccgcaagacggctgcggttatccgcttccaactcccggatgaccctgtccaccttccatgccttgccgaacaccgccgggagccgcagcttctgccgggcgatcttcagtgccgtttccggcaggggcgggctgtcggcagctacggcactgccaccctcctgccacggcagaaagtggatgctgccgtctgcccgacactgcattaccagcacctctaccgaggggtcgccgtcccgcactgccgcccgggctgccgggtcggagcgggcgccctcgttctgcatccagtcgtccagcgtgttcagctgcgccagccggtgcgtttccggctgcggcacaaggtacgcctcggcgcgtgctttctttttctcctgtgtctgctcatatatgaagcgcatttcctcgccctgcgccccgccgggggctcctagctcccagccgtagacccgctgcaccagcggagagatctcctccggcagccggatgctccggggcagaaacttccgggtgcgccagagcagccactgtccatataccgcctcgctgcccgcgtcaaaggcatcttccccggtgtccagcaccgcgcagcaggcctgctgcaacggagcggggcggctgcggtggtggcggtgcagccgtccaatgcgctgcagcagcagatccatggggcaaagctctgtgacaagaacgtccagatcaatgtccagcgactgctccatcacctgcgtgcccaccacgatcaggtcattccgttccttcggcgtggattccttgccaatgcgtgccatcagctggttttcccgcgccgcgcggtccggcatcaggaactgcgcatggaacagctgcacctctttgtccggcaggctttcccgcagcagctgtgcgatcttctgcgcttttttgaccgtgtttacgattacccccgcgcagccgccctcggccagcttccggcgcagcagcgcgggcagctccggctctgtgagcgtggtcagctgcaccgtttgaccgggtgcatccgatgggacggccgtctgctttacctctgcgccatccgtccatgtcagcagcggatagccgcagctggtttcccacggagcgtccggggcggcctttttctgctggtaggcctcgaccagctctgtgcgccgccgggcgggcagggtggccgacagcagaatgaccggcaccttgtaccagcccagccattccagtgcgcggtccagatagcagttcatgtaggtatcgtaggcgtggcactcatcaataatgaccaccttgcccgcaagccccagatgccgcagcataacgtgcttctgggcaagtgccgccagcagcagctgatccactgtgccaatcacgaagtttgccagcagtgcctgtttgtttcctcgaaaccactggtgtacctgcacctgatgctcttcctgcgcatcttcctccagctgcaccccgcgcccctgtaaccgcaaatagttctcgttcagttctgccatgccgtgcgccagctttatagcctgcggcagcgtctcctcagactgcgtgtctgcccagccaagcagccggggaaagatgccgtttgccgtggcctgtgtgggcagcccgaaaaagacaccgcccagcccgaaccggctggccatgatctccgcagcggccagcgccgcctcggttttgcccacgcccatctgtgcttccaaaatcagaatgcccggttccgctgcggtatctgcagcttccagaacagccctctgcaccgcattgggcgcaaagccgaaccgcaccgcaaactcctgcgggtctgcgatgcccggctgtgcctcccacgggaagggcagggccagcttttcccaagccctgtccacccgcgccgggtaatcctccatgctgcccagctcctctaccgggatcagggggaagtattccgtattgctggcgatccagtctgccatgatcagaagtccggtcaaaagcacttcctcctgcgggtccaggtcgtacagttccgtcgtatcatcaaagccgcagtcctgcagaacagtcatgagcagttctgtccaaaagccctgccagacctttttttgtcccttggggtagtagttgctctcccaaccctctaactgatcatcgaccgccgcgcagctctgtggcctgccgtgatgcgctcccacaatggaggctagcccgccgggacaatcattccacaacagaattgcctcgcccgcccgggcatgcggcgactcccggcggttctgttcaggacagtccagcggcgtcaacatttccagccgctgccgcgcctccggcagagtgcgcaggatatttgcctgaaaggctaccgtagccttgcctatatcatggatcccgcccagaaaccgggcatgcgcgagcaacgcttcctcgcgctcaaagcccatggcccgttttgcactttccgggagccactgccggaccagccgctccatgatgcccgccgtatcccacaggtgcatccagagcggcagccacaggctggtattctccgggtccgttttaccggctaaaagccttgttttattcaacgtccagcgcattttcgctccttttccggtgtgtgtgccttccgtgtaccgagcatagcagataatgtatactataatccgtactttttgcattttatctccgcaaatgaaaaaagcggcacaccgggtcgtgcctcatcaaaacgaaagtgtccttgcaaggtaaagaaaactgctatttatggccctgttccgccttctgttccaaagatacgcttctgcccttctgctgtcaatgactctgcgccaattcatcaaagctacaaaaaaacgatttcttttttgtataaaaagccgccccggcttcctactatggaaaccgaggcggttcattctgtttattggtgttctttcagacactcaatgcctaccaactggcattcagtttttgaagttttagtcatatctgtatttagaggactttccatacaccttccggagcgattttttcaggctgaccaccgtttctttgatgatctttgcctcatcggcagagcaatctgcaagctgttcggtcatccagctgtcgaacaccggctttgcttttttgatctcgatgcacagcaactcgtctgcggagcagtccagtgcgttaatgatgtcgatcagcgttttcagactgggcaccgagttgcccgtctcgatatggctgatgtgcgtgaccaccacgccgacctcattggccagctgctcctgcgtcatgccctttgcaaggcggcaggcacgaatacgttttccgatgtcggcgtagtccaccatagtacaagtaccctccgttttgtgaagtgatacttgtattgtatgtgcaatcgaccgggattgtaataatctgaaagtgcagtggacttataaatactaatcgttcagaaatactttaacttcctgctttctatcaatcgttgtcacagcagtaatggcatccgggcggaaggagtcgcccggataatgcatttccaatttcagattgacttttttcccagcttccacttcctgtgccagtttattctcaaaatttttgaattcgttccgatttagtccagaatcctgcggaatgagattttccaaatcgtttgccccatcaaagcgatctgcaattgcatgacctcgatcatcggtacttttttcatatccttttccaatatcatggatgctgtctttaatttgcagacgaccatcatgctctttcagatgcaggtctccttcggctgtaaacagccttccaaggtgatcggtagtgtactcatatccgtttcttttatactctgcatccgacaaaagatcctgctccatacggtacggcattccatcatcgttatttttgtattccagctctttttctagctctgcaaatgacttttccgtagcagcatccagtttttcttctgccttttctgtcacgcctttctgtagacgctcaaatgaccgtttgacgacatcatccaacccaatgtgcgtttttgcttccatcggtttcgcttctgagatttctcgcctcacagcacacgacctccctgccgctcaaaattcgtcctcaaatcttctacagcctccgcatccgggttcaggctcatgcccatgcttatcacgctgttcagcacccagtctgcggcagcagctttcaggccgtactgtccctgcagctgttccagaaattccttacggggtgtgaacgatttttcggctgcggcacagtaatcaatgaccgtgctgattccatcaaagaaatcaaacacagctttccgggtcttagccacatccagttcgccgcctgcaaagacccattccaggtagcggctgtcctcaggcttcagcacagtctcatggcgtttcagccagagcttcagctgctccatctccgaactgctcagcggttccagctctttgcccactgccagttgtccgaatacaaactctgcgttgatttcatgcggcatttttgaaggcttgtggtaaacagcattttccggcatgggatacgcctcaatcttgcagagcaccgcctccggccactcattctggtaaacggcagccacacccagcggcagcttggacaattcatcgatctgtgcctccttcagggcggcagacttgcctaccagcttgcgatcctcttcgtccggcagtcgcagaataattttggtgttcgtgttgcggatgaccgacatatccagcagtccgggtgcctggtctgcaatgataaacccctcaccataagtacgcatttccgcaatggcatttgccagcatttccaccgacttgccctgcaaatttgcaccttcctgtgattgctctgccgaggtcttgcgcaacaggttgtgtgcttcttccagcactgtgacatggcgcagcctgctgttcatcccgctgctgcacatccggtattcctgtaacttcatcaccaagatgcccatcagcagcgatttcgtttccatagagcccactcggctcaaatccacaataacattgcggtcaaacagcgcttcgtccgtcagcgcatcttctgcgcaaagcacactgccataaataccgtttgtcagagactttacgcgggtgcacaatgcgcccacataatcgctttgggtatccttggaataatgcgactcttcaatgacgcccggcagaatatccagcaggtcaaagaaggttgggaaaactcccttctcgctctccgaattgcgcagatcccagcctactttctgatagctgcgctcaatagcatccttcagcaccgctggcatggctgcatacatcggccagcaggcgttgaatatctccaccagacggtcaatatgttccagaatatggatattctcagggaatgcaaaggggttcatgcgcagcagcggcgtttctctggggtttgtaccaaacacctgcacatctgtacaattgccgaacacgttcttgtattcgcccttggccggttccacaacaagaaacgtcgtttgtccgttctttgtgatctcatccagcagatggtagaccgcattggatttgcctgtgccggtcgagccagtgatgaatgtgtgggaagccattgcctgccgattcaagagcagttctgccgcttcctctttgcccatgtggtaaatcttgcccagattcatcttgtcctcatccggcatcgcctcatccggcacattgcggccaaactccgcgtgctcaataatcggcaaaccatgcactgagcgggtgggcaagccaaggtgcatcggcagttcccgcccgctgaccagcgttgcaggtgtataaagcagactatccggcgcattctcccatagcgggcgagcaaagaccggttgcatgaaccgcttgagatattcccgcagctgtgccacttctgcctcattgttcttccacacattgacggcaccgctctccaccgaggagccctcgcctaccatcaatgcgcggtaagtgttggccgccaaaagtgctgtggattgagtagacgaaaggaaatacgctgcacagttatagcagccataatcttcactttcctttacacgcttgagctggttttcaatgcgttccagcagttcctccaccgatttattgcacagttccacctgctgagtacggcccgtgccgcgggtgtccgttgtgccgtggctctcctgctggctggtggtgtccgatgttccatgcgacgttccatcggaggtgctgtgcgaagtgccggtctgctcggtggtagagtggctggtaccccgcgaggcgtttacgcccagtgagcctccgatgttccgggcgatgctgttgaaagccgttctggctggcgtcatgcctcctatggccctgcccgccgtgccaagcagcgggccgatgacggcccccgcgcccggaatcagggccgaagctgccaagccgcccagacccagaatgcctgcaatgccgccaaccaccggcgagatttttgtgaccgaggtgccgaagctgctgccgacaccgccgttgataccgccgctgacccctttcgttttctgtgtgccgtccgtcaccgaagaggactggttcgtaccgtccgttgtagtcgtgctgacagtatcgctgatggtatgggaagttccactgcacaggctctccatcacagcagtactctggttctcggtataagaccatgtactcttgcggaagggcgaaagagtgctgtacagattttcgtacccgctgcggatagccgcctgcgtttcattggaaacaggttctgccaaaaacagcgcagtatacttttctccttccatcgcgtccataaagcgctcgatgccctgcacaaaagctttgtcttccgttttagacttatcgcgcagcgctgccacacaggacactgaggccaccgcctcctgctcttcgccaaaggcttcttccaacagtttttttcccgcctccggagaaatgccttttatatcggaaccggggaagttggagagcagcactttctgcaacgccttgctggaaatttccagcttgcggctcttcatgctctgtttcaggggatcctcgcgaacgcccagatagatattggcaccggcattttcttccggcacatcgatcatcaccgccagactacagccttgtgccatgctggaataatacaccgtggaaagcttctggaacatatcttcgccctttttcagggtcagtttcttcagctggaacattcggatacactgagcgggatcctgcacctccagcatcttctgagaaagctccaccatgccatagttctgcagttccgtcagatattttttatacaccagatggtctgcaagggtcagctggtccgtcaggtcattcagcgaccgctgcgcggaaagctgttgtttttcaagcacttcaagctcgtctgccatgatttattttcctttctgctgttaacccctcaaaattttccacaacagacctacactggccgccgcgacgccggccgccactgccgtacccataccgctgctctgcattctgtcaatggcgctctttgcgctttcattgccctgctcagccgcttttttgtaccattgcatggcctgttctttatcctgcgtcactccgtatccattttcatagaacacgccaagtttatactgtgcatcagcatcgccctggtccgcagctttccggtaccactctgccgcagttgctttcgataacgttacacctgtaccatattcgtaacagatacccaggttgtactgtgcagatgcatcaccattctccgcagatttttgataccattctgtcgccttaatgacgtctttttctacgccaatgccgtttttatagcagtatccaagattacattgagccattgcatagccttgttctgcagatttgcggtaccattccgccgctcttccaaggtctttcgttacaccatctccgcacttataacaattccccagattgtactgcgctaattcattaccattctccgcagatttacgataccattcaactgctttcgcgctgttcttttccacgccttctccatttttatagcaatagcccaaactgttctgcgcatctgcattcccctgctctgcggctttccgataccatttcgccgcttcttctttgttctgtgccacgccatatccattttcatagaacaagccaatcttatattgggcacttgcaattccctgatctgcagccttacgataccactctgccgcagtcactttcgattgcgtcacactctggccatactcataacaaatgccaagattgtactgtgcagatgcattaccattctccgcagatttacgataccattcaactgctttcgcgctgttcttttccacgccttctccattgtaatagcaacaacccagctcatactgcgcatctgcattatagttttccgctgcctcctcaaaccattttactgcttcgccttcatttttctgtaccccccagccatggtaatagcactcaccaagatcatattgtgcctcagcatgatcctgttccgctgctctcttgtaccactttaccgcctccgttttattttcatctacaccccagccgaagtaatagcagtaaccaatcttgcactgtgcctctctgtttccgtgctccgctgatttcttataccactctgcggctttctccatgtccaagtctacgcccacagcatcctcgtaacattgtccaagtttatactgcgccttggcatcattctgttcggcggcctttctgtaccactttgcagcttccttatcatcttcctctgcaccatcgccattgtaatagcaatcgccaagtgtgcgctgtgcctgtgcaaatccctgctctgcggctttcctgtaccattttaccgcttctgttttattttcatccacgccccagccgtgatagtaacagtcaccccattcatactgtcccttcatgtttccctgttctgcgactttctgataccacattgcagcttcctgaattttctcatcggtatcattcataataccatcacagaacaaattttctgccaacttcagcattgccggttcatttccgttttctacagcttttcggtaccattttgtggcctcatcttcatcataataatagcactcgcccatcttgtactgtgcctccgcataaccctgctctgcggccttgcggtacagctctacagccttttcctcgttcttgctgacgccgtctccggtttcatagcacttgcccaattcacattgcgcttccgggcattcctgttctgccgcttttgtgtaccactttacagccgcctcattgtacgagagttccgcatacagccgcccggtcatatactgcgctgttacatttccctgagtcgccgccgcttcgtaccacttgcgggcctctttgtcgtccttttcaacgcccagagtctgataatagaagcatccgcccagaacgcactgcgcctcggcattgccctgctctgcggcctttttgtaccacacgagcgcattttcttcgcttttttccacacccgtgccgttctgatagcaccgggccactttaaactgtgcctcggggtgtccgtaatctctggccgcgaccatgtactgctggaacgccatttccgcattgcctgcctgctgataattttgggcattatgcaggtagtcctgctcggtttcctttttcgtctcctgttgcgcttcctcgcccagacagaagcgttccacacaagccataaactcctgctttttatcttccgggccaataaacaggaagctgtatacagtgtttttctctccactgaaacccatagccttgatctcagcccccagaccatcccaattcacacggccagccgccggttcaaaccattcttcaacagattttgtcatgatggcattcgggatttccatctcctgcccacccacacggatagactccagtttatctgtaaaacgtacttccacctgaattttgctcatgatgatagtctccctatgtatttataatttttatatagtctccctgacttcgtatccacatctggatgcccgtgccaaacacctcggcttccacgatccagcctttttctgttacctgcaaaacctttgcagtgggcagtcggtcgagcacggattccagacttggcccggtatactcgaaccggatggtctgcaactcgccgccgtacatgaactggatgcgcttgcgcatctcgccttcctgaaagcggtcagtataacgctgggcaaagtgccggtcgagggtcttatagttctggatacggtcgatgcggtaaatcgtcggggagttgtcctgtgggttccggaagtgcttatccttgtcgatgccctcaatgaacgctgccagatagaaataatactcactgaacaggatgcccaccggctcaatggtgcgcacgcgggtctcgccgtcatgggtgcggcagtaggtaatttccataacattgtgattttctactgccgtaccgatttcccacaggctctcgataaacttccggccatgctgcggctcgacatagtgaaagcgttcgttgctgatgaggtctttgacctgattcaagcgatccagcggggtgcacacccgcaccagcttgtccagaatggggaacatctcctccttgaccatggagcggctttccagcaggatcttgcacactgccagaatctcgctgctggtgaggaaacgggaaagcgtatcatccagcagatagccgccctttgcggagttgtataagatctcccggcgcggctcgctgtctgcaaaatagctgcgcagggtatcaagatcgcgctggatggttttctcgctgacaccgaagcggtcagccgtctgctgtttattcagcacaccgccctgtaccagcacctgctggatatagagtatacggtctaatctactattacgcacggttcattctccttctctgctcattgtaacacagtgcaacaacagtcgcaattctttgtgtgaaattttgttgttttgtgaaatagctataaaatttttgtctcttttgcacaaccccagtatacaaaaaaagatggacagcttgtctgtccatcctccaaaaagccaagtgcttttctcacaaattccatctgcggttcagccggtagatcacatcccatacatcatccttaaaagtgtacattacctgacgcggtgatgcacttctgcttgccatgcagacaagcagaaacagttcggcggcaaatgccgcgcccagcagaaacatccatatctttttcattgcgcactctcctttgatggcgtttatgcccttttgtctgtctattataacgatcctgttggacagtttgcttgtcctttctgtaaaggatattttctgcttttcctgtacgttgcaacacaaaaaccgccccggcttcctgttacggaaaccggggcggttcgtttgttttatttgtgctttttcaagcgctcacgcaatcacttgcgggggttcttgatagcagcctgggcgggtgccaaaattacagagcgttcgttttactccaccatgacattaatcattatcgaatgacctttctcgaaagaagcaccaagaaatagcttgtcattgtcactccagagaacgcctctaccaatgaaaccatcttcgttgcaagtgtagcaggaaaaagatcgccatagcctactgcaaaaaaagtaatggcacttgcataaatgcactctagccatccacttactccttgatattgtaaacatggtattacataatatgccgttccgaatattaaaatcagaagaattatagttaaaaatgttcggcacggtttggttccatatccgctaatccaatccagcagcctgcgtaatcctcttatataatatcttttttcttctttcgttttcgctttttgataatgaagatgacaaatatcttcattatcatattccccgagctgtctaaaattttcctttagcatcaagagttgttcattctttttttcggtaatcttttcaactagtttagggaagtctttaaaataaattctcccactattgattgcatcctcaaatgatacttcttctgtatcttctaatgcaatccttaaaatatttgtatttatgcaatcattaaatagaaatctttttatgcttccactaagattacttttacccaaaatttcacaacgcagcaattccaagcaatcaaatcttgcttctctaatgtctaattcttttattgacgcattagacaactttacttgagaaatatttgatttcacaaaacacaaattttcaaaagtcttcggcagcggatccaagcaagcctctgtttcttctgttttggcacataaaaaatccaaacttaaagattgcgtcattagcatcgttaaaattttcgacttgcgggcttttatgtaacgaaatgatacttctggtgtaaaatatctacttccgccacactcaattcctcctaatgaaatctccgtttctataatatgagcatcgctaaattcaacatttccatttacaaggataatatcgcatatatcaagatttagattataaaatcctgcatatgaaaaatccaaatcttcactttgaatctttaactgcataagatgaatcagttttggctcttcagaataaaaaatcgctgccctagctgttattttttcatattctctataaggatttccttctacttcataaggtgctttatctccaagccactcaaattcatctatatacgtataatccaaacatatctctttttcttgccaataatactcctccaattttttataatctggaatttctagttgtgcaatctgttcttccttgccactctcgcttagttggtataccgcaacgcttttcccggatcctacgttcgttgtattatgagggtaaattcgcccatcttgtttatttgtgattttttcatcccaaatccagaattttttctcaggatttgaaacttctttcgttataagtttcatattttgcctcgcacctttttcatgtgcatcttccaatttactccggtttccctttcatcatctgacccagaatcgcattcttcgtgctatcactcaaataggccttgtttagcgttttcttagtataattcagatatgtcccagccgctttctctatcaaaagtgccgtaaagtagcgctcccagctaaaatattccttactatcgatgtagccagacggtgtttgcaaaatctgtgtggtctctgcatctttcaaaattccagaggaaagtatcagccattcaaaagattccggcagatatagtgccagattttttcttgtctgcaccaactgcaacaccctgtccatttccgggccaaaagcggcaccatctgcaatcaccagaatcttttcatccttatgaaccttcaaataggaaaatacattagattttccgttcgcagtatcacattgcatttgatgttctgtacagaccgcatcaaaaaactgataccccgaattgctgtcctcggtcagaattttctccggcttaattttttccgttgtactgtccgggtaaattcgatagaacgaatgataactccgtttcagtgtcccatactttccagaggttcggattccatacacttcttccacactgtatggcaaggccggcaaaccctctctggtcacgataacataatagttatccgtctgctgaatcgcacgcgcaaaatctttggtcttgacaaactcgtttccttcatcgataaaaacaatgctgtcctgaatattgtcaagttgtcccttccaaagatttccttctaccacgtagcaacttttatcacaatttagagtgaccggtccactctctccatcgttcatatgggtacgaatcatatctacgagagtcgttttacccgttgcactatccccacgaatgatggtcaagttgcgtcgcagttcaaattcatatttcaggtactttgtgccaacgaccactttatgaatgcctttcatttctgtcagcccctttacacaaactcacctgcggccaaaatcagctcttccatactgtgaacgatttgattcgtattcagcacttttattgtaaacggctttttgccaaaatccatcaggtgacgcaaattcaccgtgcgatcctcctgctctgcaattttgagcagccactttgcacagttgtcgccacaagtcgatacattgaacactttctccggctcaaactttaccaaaatcagtgtctttacgccaccagacaaaccaatcggtggaattttacccaagaccgggctgtcaattacaccactgtcgataacggtagacttatccacatcctgaatcatttccttgaccatcgggtcaacgatccagtcttcctcgtaatcgtatttgaaataagaagccgtattgtacaccgcttccttcatatcaccgtaaaaaatgttcagcatcttatcacctcatcgatgtgcgtacttctgctatcattgtaccctctttcagcttacaaaacaagatgcaaaaagctcttggcctccattacagaagccaagagcttttatcttctttgtcctaccagattttatttccggggagacttaattgcagcctgagcggatgtcaaaattgcagagcgttggaaagaataatagtacgtttttatggggcaacaagcgtttttatcttcgcacgaattctactccagaaatgtttcttgttcgattgtgaccccatattgcaaaatcttatcaattgcatcaacaaacagcgtatgtcttcccgcattccgctcttccttcagcttcttcagatactgctccggccgcttcaggccatttttgtggtactgttccacaaagcgcccttccatacgcatgggttcaagctgtggaaacaccgtttgcaggttttcaaacatacaaaaaccgcccagatcaatatctgcccagaatcgaatttgcatggtttcccctgccgcagcagccagtttttcaaaaagttttttcttccgcgggctcagaaagccgccgtgataaacaacaagttcttccggctgtttttccgccagcaaatattcatcatagttcgttttattttcgataaaggtaatgcagcagatgtttttcagttcaatgtccacaatctctgacacaagtgtactgggcaaagccaatccataaggttctgctgcgctgagccgtagttctcccttcttcaagcagattgcgcaatcgcccgagagttcgtaaagctccgggcgggcatagattcccagaaatgcaagctgatcccgcgcaccaagttccgcttctgtacaggccgccgccagttgggtattgtactttcgtgcaatggtaagaaacagctcccgtacatttcgctcaaaatacttggtatcgtgaaaacactggctgctgaatgcacgcatcgtcacactgccggacagctccgcatatcgttgaaacgtgagcaaaagctcctgcagcagaccgtcgtttcccctgcaatacgtcggcactttcatgctgttccgcacctgagcacatacagcatccctccatgccgcgatccatggaacgggattgtctgccagcttctgcatgatgatgtttgcaacctcttctgccttttttcgcggatgcactctgtcggcgcattcatagcactgtgcgacccgttccagatccagcacaatgcaggagagaacgctctgctttctcgcccattccagacgcaccaaagcctgctgctccagctcccgcgctgcaatattgtaagcatcccgaaccaccgcatcttcgtattgatactccggcaactcccttttatcaatgcgcagcattacccgacgtctggatgtgttgggttcagaaagatgcttactgttttcaaacttatccagcagacgattcaggatcacctgtgcttccttcattctgcatctcctttccaaatggaataatatgcatccggtatccggatttgtccactaataatgtgcggtctgcaatgggcataatgtccgagaccttatccggcggcgtacagatgatcgcctgcagccccatctttcggagaaggagtacactctccgtgatccggtcactatccattttattgaaagcttcatcgaacaccaccagacgcaccgtattaccaaaacgggtagcatcgttgacgcggtacagctgggcaaacgaggccagcaccgcaatatagaatggcgtttgtgtttcgccaccggacttcatattcagtgtttgagaaagcagctgcttggaaccgttctgatcggtcgtttccaaatcaaacttcagatacgtccggaagtctgtatagcggacgatattctcctgcagttcgctctgtttgcggacattgagctgcgtatcgtctgccattgtgatctggctgaacagtttttcgatcaatgggccgtatttttgctgaaagggcagtgcgaatagaccggattcgccttccatcagttcatctgccgtgatcatgttatagtaatccagataatccgggtttggccctacgcggaattggtacttgtctgtgccaaattgtgcctggcgcagggccttgttcagattgtgcacctggtcttgcacctggtcgatgctggatttcagtttggcaaggaaatcgttctggaattgctccattgcgctttcccgtgccgcccggatcttttctttgtatcggggcagctcgctttcctgcagagtacgccgttcttcctcgtattcggtgttatccatcacctcgatctggaatgcacagggtttgaaccgttctgcatattctctgcgtgctgcaagcagtttcttctgagccccgtccatcgcctttgtgctctgcgccaaactgtcgccgaagtttttgcggatgacatctgcctttttcaagcggacaagctcctgccgatagcggggaacgccgatggtttctcggtattccttcgtgaactcctcgttcaaaacatcttcgatggcctcataccgttggtatttttccggcaagatctcatattccagctgatggatgcggtcttccaacttccctttttgcacatttttcgcatctttttccttattgaatgcaaggatttcttctttcaactgttcaatgatgcgtcgctgctcatccaaccagaacagattcaactgggaaagctgatttttgacttctgcgatttccttgatgatcgtctggacgcgctggtagtcctcctgcttttgcgccacatcgattcggacaaatctttgggtaaaaagcggctcctgcaggccggtcagctgcttctggagcggctgccaatgccgcagctcttcctgcagacaggccagttccttttccagatggtcgatgcggagctgcaccgcacgccgcccgatgaaggcgtcttccatccagcccttccgaagtgcgcgggccacatagccctgatacagcattccctctgccgtaattgccgtcttatagcagcgcaactgttctgccgtgtcgcagcatatcacccgacccagaagatagtccacatagctgcgtgccagcttgttttctgtctccaccttttctgccagactgccgggcagcgggcgaagtgtttctttttcccgcagttttccgatatctaccagaccaaacgcacggtactctgcttcctgcttcagccggtcgtaaatgttaagtgcatcctgataacgtcccggctccaccagcagataatatttctggttatttaggtagccttctaccgctccacgccagcgctcatctgccatttccagcacatcagccagaatataaacgggaaccgcatgccccgttttatccgccagatccttttccagccggtctttgaacagcagaagtccatggggataatcttttatgttcctgcgcagatttgcaagcaccgcacttttctggtcagcttgcttcttcagctctgcaatacgatcctctgttttatgagccgcactgcggacagcatccgacaattcggccactgcctgctgccccgtttcaaacaattccacaggccgggcaaacaatcccttctcgtcaccagtaaatacagcatatgctttctgcgcagtgttcgccgcttcctgcaccggtatgagaagttcttccggttccagttcttgtatctccccacagaatctctgcaaatgccgtgcttcccgcttaatctccacttcaagattttgcagaccctgttccagctttttctgctcatctctcagagccttttccgtgttgagcagacgctcttcctcctggaaaacgttgctctgcctgtaggccagctccagctcactgcggcgcgtttctttctgttcgatctgccgctcaagctcctcccgttgctcattcacatttgcaaggttctccttgcattcagttcgttccaattccctccggtcgatctctgtctgcgcagcttctttttcggcccaccgtaccagaaacttctggatctggcagcggtctatggcttggttcatctcctgatacagcctgctgatttgctgcagcgcatccagcttttcctgctgacgctgcgccaacaattcgtgccgtttataatcccggatgttttgctgcatcagctcaatattgggtttatccggaatatcgcagatgttctccgtaataaatttttggatatccacaattggccggaacgaaacagccttcttcatcatccgtaagacctgctcgttgtggacgttccactttgcaagcatgttgcggcgatactctttttgagtatcgtaaaattctgcccgtgcatagttctgcttcaaaaaacggcgaagtgcagaagtctccattgcctcgccctgctcaataaagcaattttccggcagtgtccccgtgtaaataaagaatgtatcacggtaacttccatcgctgcggcagtcaaaggtaacgcccgtcacaaagctgctgccctccatctcatcctgaaattcgcagacaatataggtggaaaagtccttaccacgacgggaatacgggctgttatcatccatgtcggcgcgcagatagccttccagtgtgcgctgcgatttttcgttggccgcctgattaaagttgtgggcgttggtctcgcccagcagtacgatctgcagtgcatcgatgaccgttgactttccggcgccgttcttgcctgtcagaaaattgatgtcgcccacttcaatcagttccttactgaaatagagccagttgatcagcaggatcttcttcagcttcttcatctgtttcctcctttttcaaaacagacaccaccaagttcagcttttcgctggagaccgcagagagaatggtgggcaatattgcgatcctgcagctgccctggttgaattttccttccagtctttgaatcacagaatggttttccagtaccgtaaacgcgcgtttgacctcttccatattcggcttagccggaaaaacgggatagtcggtcaccactttttccagcacatcccgcacagtacacacggcatcctgctccaaacccaaacgctccatattttcttcgtagatcagccgtaatgccagcaaaatcgccgtttcttttttattgaggttgcaacggttagcctcgtctgtgttcaacacataaaagtatccgttcagttcatccctgcgcaaatcccagtccagcaggctcaggtactcctgtacagcctcatagtgccgtgatagaaaaagatagtctgggttatccaccctgccttttcccggctggtagatggttcgcacaatgtatgtgcggctgagcagctgattgcagacagatttgaactgttccagttcttttgccgttgcattggtaacaaaatcaaaattcacggcttcttctccttcctccggatctgcatttgcgggatcgaatagccatttttgcaaaaaatgccatcgagttcctggaccacataaccggcagatgcatccttgcttccaaggattgccagtaaactcatgatataatccttgtcctcttcaagcgagagctcctccgagcaacgaatgtcagcgtctcccagccatccctgcacgtaagcatttactgctgcccggccatatttcgattgcagtaactgtgccgctctgacctgttcttccgtattcggtgcctgatcatcttgtatcagcaccgacgcggtttttgtccgtttttcggggcgcttacggtaccacagacttttttctgacaaaaaagactgctcatacaattgaaatgccggttgtatctggtccaccagctcagccgccctgcggtttctggacagtgccgtcagcaaaacattcaaattgccgcgcacgctttgatctcggttcgtcaggttctcgattttctgtgttgctgccctggtatagcgccggacctgcgtatcaatttcctcaagatagtccttttctaaattgtcatagcgttcttcgatccagaaaattttcctcagcagatcggcacggcagtcttccaatgtcttgccccgcttatcacgcaatgcttcatttgccatcgccatcagcaaggtatcatcctcttcccagcgcctaagcacagactgaatgggcacacgatacttcggcactgaatctttgattttcagcggacggatatatgcctccacaaccttttgtccgaagtcgttaaagtgtgcagccagcacttggttgacatcctgcatatcgatctgcgtctgaaaataatgcttcacattatgatagaccatttgcaacaagctaatcagcgccgttgtgttatcgtaggcactatagagagccgtcattttatcgtaagcattgttgctgtcgtcggcggtctttaagactgagaaagttccgaacacataggaatatccacgagccggactatcatccctgagttgatgaaatagttctagcaggcgactgctgtaattaggaatcgtgatgtactcttcaaagtcgtccccgcgttctttctcaaaccaccccttactacacagcttgcggatcaaaaaacgagcgcggccagagatatccctcagttcctcttcgtcaatgtcttcatcttcaaacgtagcatccgccagttcctgctccagcctgccgcgcagcattgaatacaagacatcttcccgtattttcaagttttcttggtatgctgcgtacagtacgtccagtgcatccgcatataaaatacggttgggcgaagccaacggcgagaaaagttcactgggaaccacttcgaaaaacttcataggcctaccaccttattcgactgatatacgctttcttttctattattgtaacctctttccgcttacaaaacaagatgcaaaaagctcttggcctccattacagaagccaagagcttttttcttctttgtcctatcagattttatttccggggagacttaatcgcagcctgagcaggtgccaaaattacagagcgttcctcgcttcatttgttctatgcgattaccctcaatctcatagccttttttcaaatccgccatggatcagaggacctacaaagaatgtgacgaaggcattgggatcctgctcgtgaataatttcctgcagctccccgatttcatacttgttcacggcacagaaaaggatcttcttagggtggttggtgtacgcaccgtatccgttccagaaggtgacgccgcgtcccatcttctgcaggatttcagtctgcacagtggaaacatccgtaaatatcagggccgccacattgatgttctggtcgtgaaacctatctgccaccgtatacaggattgccacaaagatgatggagtacatcgtagtttccaaatcaaaaaggaataggcagaccgaaaagagaaccgcattgacataaatagaaagccgtccgcttttaaaatctgggtatttctttaccagacacatgcatgcaatgtccatgccaccacagcacccactgccccgcagcgcatagccgacacctacaccacagagaatagcgccgaagatacagtttagcagcacatcctccacaaggggtgctttgagcggcggaagtactgagagaagcaacgtctgcactgctaccgagagcatggttttgatgcagaacctgcggctcatgacccggtatcctatcaggaacagcggtacattgatgagtaaattgatcatgccaacaaggtttgcatcactgcggattgcaatgaacctacgcagaaaaatctctataatctgagccaggccaatcacaccgccaaagttgataccattgggggtgacaaacaggtagatacccagagtcagtagtgtagagccaaatatcagatcaaaatactgcttatatgctttattcatagcactcttcccgaatcttctgtgcgtaccagccaaaagaatcttttttgtagcgggcgaggtctccggtgccgtcgttatgtttatttacatagaccagtccgtaccgcttatccatttcaccgccgcccgcgctgaccagatcgatgatgccccagaccagatatcccatgcagggaatgccgtcctccagaacggcttttttcatctgggtgatatgagcatcgagatactccacccggtaggggtcatggacggacccgtccacttccagagtatcctccacgcccaaaccgttttccacaatgaacagcggcttgtgatagcgatcatacagatcattcatggtcacgcgcaggccgaccgggtcgatctgacgtccccatttcgtgatctgcagatacgggttgcgcagggtagtaatggcgttgccatccgccacatttttcagatgctccggatccgtggagatcagtctggaggaatagtaactgaaccccagaaaatcgcaggtgttctgagccagaagttcgtcatcacccggctgttcgtccagcgtgatgcccaattttgccaagtaattccgggcgaatccggagtaacagccgttcaattggacatccggaaaaatgtaatttttgttgttactgatacgcgcttccatcacatcattggggttacaggaatagggataaaagcttccggccgccatcatgcatccaattcggaaattcgggttgatttttttaccgatccgcaccgcgcaggcacttgccaccagttggttatgcgcggcattgtacacgatctggttgaactccgggtcgtccttgtccaccagcaggccaccgcccagataagggatgtgggtgatcatgttgatttcattgaaggtcatccagtattttaccagattccggtagcggtcaaacatggtggcagcatatttttcatacagtgcaatcagcctgcggtctgcccaggcaccatatttccggatcagggcttccggcacatcaaagtggcacagggtgaccaccggctctatcccgtacctacgacactccgtaaacagctcctcgtaaaaacgcaggccatcttcgttcggggcgttctcttccccggtcggatagatccgcgtccatgaaatggacaaacgcagcgccttgatcccgctctctgcaagaaggcggatatcctctttgtatcgatgataaaaatcaattgcttcccgactaggataataatcgtaccgcgtttccagaatgtttcccggatgcagcatggcattccatctgccgtgggctgcatccggcagaaagtcagcagacgcaggcagcctgccgtcttcctgccaggcaccctcgcactggttagccgcaagtgctccaccccacaaaaaatcggacttaagtttcataatacctccaacgccccgggacgcatgcgctccccggggcgaacaaaattttgagatcagtgtttcttcaagatttcctcgtcaaagccaaagagaatcgtaagtacacaggatgctacgatcgtcacgatgattgcaataaccatagccacgatggtatcctcaaagatcggcagggcaaacagggaagaagaaccatactcgtagttatgggcacccagcagagcggccacgacaccaccgatggcgccgccgagggaaacagcccacataggtttcttcagcggcaggttaaaaccgtaaatggccggctcggtcacactagcaaagatgcagcccactgcaacggacagtgcttcggatttgattgccttgtcctttgccttgatggcgatgcccagagaagcgccgccttctgccatgttggacagcagcatgccggggcgaaacaggggatcaaaaccagtttccgacagcagctggatcatgggagctcccaaggtcatgtgcatgccggtcatgaccatgtaggggaacagagccgtaaacagcgcaaccgtgatggggcctgcaatgttatacaaccacagaatcgcggcggtgacataggtgcctgccagctgacccagaggcgccagtgcaaggatcgagacggcataggtggcggccattgtcaacgtaccgacaaagataggcttgaacacaccggggatcactttgttcaggaatttttccacataatacgcaacgattgccagcagcagcgcaggaagcagagaactgccgtatcctttcagggcaacattgataccaaacatggtgactggatcgccagcacttacaatagccgtccattcaggagcgaccagtgcaccggccacgaccatggaatacgtgggggtcgcacccagtttcttggccgctccataagcgaccagaatgggcatgaaataaaataccgcattgcccacgatgctcagcagcgtataagtagaactgtccgcaaagggagcataaaccttggagatcagcagcaggaacaccttgatcataccgccgccgatcagtgccggaaccataggctgtacggcagcggaaatgtaaccaatcactgcctgcccaaccgaaatcttttcgcctttcaggtcaccgtccagtttttcgtccacagcgccgccatcgctgtagcccagcttcagcacctcttcataaaccttcagcagatccttgccgatgatgacctgcagctgaccgccctgataggtgacgcccaacacgccgtccagatcattgatagctttctggtctaccttcttgacgtccttgaccgtcatgcgcagacgggtcatgcagtgaaatacggaagtaacattttcctttgctccagccaacgtcatgatattctgcgccagctgtttgaaatcttttgccattgtaacatcctccaaaaaatcttcctggatggtaacggacagaatgttccggttcagttccgtaccggaaaccccatccaaacggttcagttcttctagatctgccataccgctgtctttcacagtgacatacaggtgctctccgtcaaaacgttttcgtgcaacattgccttcaccaccgatgtgatgtatgatagtttgaaagaatgcatcctgtttcatggctaatcctcctgattttttatctgaaaagcgatgcgggccctgcaccgctattcattcaatatgtaataaaagatccgggcacaaagcgccttcaaactacctgaaaacgcaagcgttttcaggtaggatgcgctctgtccccggatcacgtcccgcaaatggcgagtgccgctccaagcaacggaagctgtttatgtatttttctggcagacgcggttgatatgcaacatcaaatagagaagctcttcatcattacagcaccaattctcctgcttttgcaagaaagccgcaatctttttagcacagatatatgttttagggtaatcattggccagcatctttaccatgctgccactccccgtttcgctctgagtaccgctcatcagccgttggatgagatagcggatatgcatcgtgaaccggtagtaactgtagctgtccttatccagtttcaggttcatttcccgctccacaatggactccacgccttcctgaatctccaacgcctttacgagggaatggatctcgctgttttcgatttcagcattgatcaaatgcattgcaatgctgaccgcttcggaatccggaagtgagacccccgtgtattccttcaggatatccaatgcttttacgcccagatcaaactcattgggatacagatgacggatatcataggcaatggggatcgtcaggttcaacccgctgcgaaaacgctccaccgcaaagttcaggtggtcggccagtgtcagcggcaggttggagttaagggtcgtattcagtacgacctgcgcatcttctgtaatgtcggcactcgccagaagaatctcctgcggaagagtactgatcatctcaaaataacgcgggtcgatatcgtaaaacgtgcggtctatccgcgacatatccgttagttcgtatggaaccgccggaaacccgatgcccttaccaatcacgatcagttccttcccgcgggagtcctgagcaacagcggcactgttattgattttccgaacaattcgcatagcacccaccctctccgtttcggataaagaaaaagcctcggactgcagtcataattatacctgcaggtatagacactctaccgagcactatcctttgttcacaagtacaactgacgcttccgaggaatcacgtgttgtaataagatgttaacataaaattcatagagattccattcgccttttgtacaattttatcgatcattttttgtgcataaatacttcttcttttaactttaaaccattcataaatccaccaccttattcgaccgatgtacgctttcttttctattattggaacctctttccgcttacaaaacaagatgcaaaaaagctcttggcctccattacagaagccaagagcttttttcttctttgtcctatcagattttatttccggggagacttaatcgcagcctgagcgggtgccaaaattacagagcgttgggagtggcgatggtacgttgtttcaccacttgtttcatcagctggaacacctgccatttgttcacggagccctgtgtgccaaaatattccgcactttccggctgcatcagctgctgctccacggcccagtgcactgccttttgtgcgtctagtcccgccacatcctgataatggacggtcggagtcacatccggctttccggccatagtccacagaacgaccgccagttgctgccgtgttgtcggcaccgccatgcccacaggcagattggacaggatataacgattcactgcccatacgccaatgccaatggccgcacccgccgccgcaccgactgccgctgctgcaatagccgcaccaccgccggatgcatccggggtcggatcaggtacttcggatgtcgtatacagtgcactgatttttacgcaggcatccggcataataaaggtagttttagctgctgtgccgtctttcagttccaacgtttgcggcgtttctacctgccacccgctgaacttcattccttccggcgcagcctttgcatgaatcgtgatttcggttccggccaatgctgcggcggcttccgcgccgttcacaaacgccgtgccatcctgcacttcgatcgtgtacggttccggctccggcttcggcgcatccttgtaggttgctttcgctgttgcattgccctccggcatacgcacggtgatggtttcgtctgtcaggttgccggaaacaagttccaaattctccgaaagttcccactggtcgaactgcttgccctcagccggagtgttcgctgtcagggtcacttccgtgcctgcttcggcagtcgtgctggccggtgtgccgctggtgactgtcagggtgtactccggcttcggcgcatccttgtaggttgctttcgctgttgcattgccctccggcatacgcacggtgatggtttcatctgtcaggctgccggaaacaagttccaaattctccgaaagtttccactggtcgaacagcttgccctcagccggagtgttcgctctcagaacaacttctgtaccagcctcttcctgcctactggtcggcgtaccgtttgttacggtcagagtgtatttgggtttcggtatttctttataaactgcttccgcagatgcttcttttgccggcatccgcaccttgatggtcgcatccgtcagagcaccagaaacaagttccagcccctccgaaagcttccattggtcgaattgtcggccctttgccggttctttcgccgtcaggacaacttcctcgtccgctgtcagtaactgggactcatagtcatcgtccattacgattctcagcatataccgcggcgcaaacgtataggatgcgaacgcactcgcatcaccccacggcatttttaccgtgatggtcgtatcggtcaggcttccagaaacgatttccagatcatctgacaaaatccagtgatcaaactgcattcccttgtcgggcgcattggccgtgagggtcacctccgtgcccgccacggctgtggtgttttccggggttccgttcgtaacggacaaggtatacttttccgcctcgtacagcgctgtcagggtcacatcgtgcgccggcatatagaacataataccgttggtggtcttttcgtcctccgtcagttccagatccttcgtttcccagccggtgaagatccagccagtgcggtcctccgcataggcatagacatactccccgtattcctttggttccgcttttccgttcacggtcagagtatagtggttgattgcatagtttgccgtcagggtcacatccccggcgggcatggtgaatgcaagggtcttgctggttttgtctgccactgtcacgccatccactgcccagtcggtgaaggtgtagccctccttttccgccgccgtgacggtaaccggctcaccatagtccttgaactccatcgtatcgtctacggtcagcgaatacttatttgcggtatagttgggcgtcagggtcacatcgccggccggcatccggaagagcagggtctggttatatgggttatcgacctgtgcacctttcacggtccagccggcaaaggtgtagccttccttttccggcgcagtcacattgaccagtgaaccgtattctctggattctgttttgccgtccacggtaagatcatagaagcggttctggtaagctgccttgatggtcacgctttcgccgggcattgtaaaggtacacccgccgtccgtcggctgcatgtccagttcgggtgcggtttcccattccttgaaggtctgcccttccgggaactgcgtttcgtccacctgcaccagcaccagttctccggccttgtgctctgtattttccacggtgccgcccgtgatgaaaatggaatatacgccatcctcatagatcgcttttgcagtaacatcatttgccggcatcttgaagttcagcattctgccaaattttattgtcttcgtaccatctaggccggacagttcccagcgggccagttccttgccgtatggcggctcagccgtcagccatacattgtcaccgtactgggccgtggatgcgggatttccatttaccgtagccgtggcaccttccagcgtgagtttgtatatcgcacgcttccacacagcccggatggttacattctctgcgggcatgttgaactccgagccgtcaattttttgaccattgacctcccagtagtccagttcatcacccacattttccggtacggctttcagatagatacgttcattgtactttgcgtctgttgcctttttataattttccgatgatgcgttaccaccagtaattgttatcgtatagtagatatctttatacacagccttgatcttgacgttccagtatggcatggtaaagctgttcctcatgatggacaggttcgtgttgtcgcctaccaccttccaacggacaaactccttaccgggttccggctctggaaccagcgtaaccgtcttgcagtatggcaccgctgtcacggtcttgccgtccacttctgcccgtccgccctcgacttcgaccgcatacagatttatggtataaattgcttccgccgtcacatcgttggcaggcatccggaaatgcaggcgcattttctttgcttcctcttcactgatctccacgccgcttatttcccagtggtcaaagatctggcccgtccggctctgtgcctgaagtgttacccaatcgtggtaataccttttatctgccctgccattctcgaccagcgtatactgattggtgctgtagttcgttgtcagctttacctcgttggccggcatccggaaatgcagcgtctggctggtttcatgctccaccgtcacaccttccacagtccagccggtaaaggtatggcctacctcgtccttcgccgttaccgtgacttctgcgtcatattctttctgcaccgtttctccgtctactgtcagctcatacagattcagcgtatagtttgccgtcagggttacatcactggcaggcatcgtaaactccagcgttttgctggacgcatcctccaccgtcatgccctctacggtccagctgctgaaggtgtggcccaccttatcttccgctgtgacggaaacgctgtccccgtatgttttggtttcgggaacgccattgaccgtcagtatatagctgttgatgtcatagtgcgccttgagcaccgcattgccgtccggcatggtaaaagtatcgccctcgattttttcatcgttcagcgtccagtagtcaaacgaatagccttccggcgcaacacctcgcgtcagcgtgatggtatcgctcgcagcggccacggtattgtccgccgtgccgccatccaccgtgacggtataaaggttcagcgtccagccggtatcgtccgggccttcaaaggcaatgtagtcctcgctttccgccaccttgtacgtgattttatagcttcccggctgcgtgggcatgataaacgtctttttataataggtcgtgaccacgcccatgcccggcacatccgaaacgacctttctctgcgcctgatcccagcggaagtcctcgtacttcgggatttttttagtaatcgagttcagcacaaggtcgtcactctctccgcgcatttccatgcgcagttgcatcggcccgccggcctttccgttgtatttaatattgccgctgacatcgatcacatcagtggagggcacaatggtgatctcttttgccagcgtgtcggaagccacatacagcaccgtgacattttccagcacaccgctcacatcggcattgccatttttaagcaaagagaaggttgtggtgccattcgcataccgcaccgcagcagacaaataataagcatccggcttgtttttgaaaacgccgccgtagatagtcgggccggtcacatcgccgataaacacgccgtcctcgatctcgctcgaattatcacatgtgactgtaccgctaaagatgccgcccctgacaatgccgacttttgtgcccgcgcccgtgttgttgaccgcgcccttccggaatgtgccgcccgaaataacaccgccgctgttgctgactatataaccattatcaaacacaccgcctgaaatggtgcccgaaatattattcagcacgccattcagcaccctgctgtccgtaaactggccgcccgtgatcgtaccgccggaattttcgatttgatagtagaaccgaccaatttcaaattttccgccagagatcgtaccttgattcgtgacctgacaattttttccaaaggaaccaccgctgatgataccgccctcacggttttttatgatgccatatttacttgggtttccaccccggttaccatagtcgtcccttgtaactgcaaactccggtgttccagtgatttcacctttgttatatacctcgccgtaaatcactcctccggaaaccacgccgccattccaaagctggcctttgaatgtaccacctgtgatggcgccgctgttacggacaattcctccgacccactgcgttttggaaccatttggcccaacattcatgcttgtatgcgggagagcatgactgaatgtaccgccttcgatagttcctgcattagaaacttcgccatttacttttccgtccacaaatgtggcacccgactcaatggaaagcttgatttcatcctgcagtgcaccgccagtcagcttgaattgtccctttttcagggtcagcgttttgatcccgagcaggtttgttccatacgaccaaaattctgtattcatgttatctgtagatggttcttcaccaaaagaaacgcccgaaccaaccttgatctcaatgatatcatccgtcatcccggcatcgttttcctgtttcagtatctctacagtgctctctgccctgggcatcccttttgcaaatgcctgaaccggcatcatgctcactatcatgctgactgccagcactgcactgaccaagcgttttcctatccgttttctcattgcacaggctttcctttcgtttctctttattctcatctcaatataacgcttatcgcattatcctcgttgtggggttcattcctgtaaaaaattatacattttttattcttttccgtcaacgtttattttccctttttaacaaaagccaccccagttttctgatacagaaaccggggtggtttacccttgctgtttttttcagttcatccaagtacttcttttttcggctattatcttttcccgaagctacattgacttctgccaccgcaataatatcaaggtaggcgtcatcaaagatgatattgccctgctgcactacattggaaagattccatgagttagaaaggatttctttggtcggaataaaaacactgctcaaatcaaccatccgcttttcctatgcagctttcccggcgacctccgcattatgcttctggctcttatgcgtgaaagtcatagcaatattggtatcgtttgaactcacctttactaatgccttcttttcaccctctgcatggggttcatcttttgcacatttttcgttcttcataacagcttttcatcgtcagccaactcagcccgaatctgcctcttatacataagaaaaaactccccctgatctcctgttgcggaaatcagggggagttgatgctttacttgtgctttttcaagcgctcacgcaattacttgcgggggttcttgatcgcagcctgttctgcactttataaacggagagcacaagaaagcacatattcacgttatttatttttccagacattcaattttttgtccactccgtaatattttcaggaaataacacatttctgcttttgcagttttggggacaaactacaacgcattttttcaccttttttccatccattttttctcaaaaatggaacttcaaaaaattttccatatcacaaaaaggaggtatttttccacatgaatacacccatacagttgaaaatccgaggtcacaccaaatgacgctggactacttttatggtcagtcgggcgagttgttctcctacttccgcatcccgaaagcactgttccaagacagccgcttccggcagctttccacggatgcccggacactgtacggcatcctgctggaccgcatgagcctgtcggccaagaacggctggctggacgagcaggggcgagtgtatatcatttacaccgtccgggaagtgcaggaatccctttgctgcgccgagcacaaggcggtcaagctattccgggaactggaggacatcgacctcatcaggcgcaaacgccgtggtctgggcagacccagcttaatctacgtcaaggacttttcctccggcttgccaaaagcgcaagtacagaattgcccaaacagcaattctggagcagtcaaaaccgcaagcaaataagactgataagaataaaactgagtggaacgatcctgaccctatctattccgggggcatccgggagcagcttgaggattatttttatcagtctttggaggtggacctcctgctccggctctgcccggacgatgaggacaccatctaccagatcgtagacctgcttgtggatacctgttccaccaaacgcaagatgttgcggattgccggagatgacaagcctgccgaggtggtacgcagtcggctgaaaaagctgaacgccgaccacatccgcttcgtgctggattctctggcagagaacaccgccccggtgcggaacatgaagcagtatctgctggcgatgctctacaatgcgcccaccaccatgaacctctactatcagaacaagacgaaccacgactttgcgcgcggttcaccgaaggcggggtgatgttatcgcaaagaaagctacgattatcgcagtcaccaatcaaaaaggcggtgtggggaaaagtaccacctgtgaaaatctgggcatcgggctggcgatggagggcaaaaaagttctgctggtgggcaccgacccgcaggggtcgctgaccatagtcgcttcgctcttatggctagttgtgtgcactgcgtgcagatttatatttgcccgccatgcggacattgccatcagcatgggctggcagcagcccgatgaactgcccactaccctctctaccctgatgcaaaaagccatgaacgaccagcccattcagcccggtgagggcgttctgcaccatgcagagggcattgacctgattccagcaaacatcgaactggcagggctggaagtagccctcgtgaacagtatgaaccgggagaagatgctcaagcaggtgctggacagtgccaagcgggagtacgattttattctgctggactgtatgccctcgctggggatgctgaccatcaacgcactggcggcggcagacgctgccctgattcccgtgcaggcgcagtatctttccgcaaaaggtctggaacagcttttgcagaccgtccaaaaggtccggcggcagatcaacccgaagctgaaaatcgagggcattctgctgaccatgaccgacagccgcaccaactacggaaaacagatcagcaatctgatccggcaggcatacggaaagcacctgaaggtgtttgagcagaccattccccgctctgtccgagcggctgaaaccagtgccgtgggcaagagcattttccagcacgaccccaagggtaaggtggcagaatcctacaaatctcttgcaaaggaggtgctggcggatgccgatcgacaacggaaacttagctctgaaagggctagatgacctgttctccaccgaggaaaaacgacaagaggagcaacgggaacaggtgcagcagattcccattgatgcgttgccccccttcaccaaccaccctttcaaggtgctggacgatgaagccatgacccggacggtggagagcatcgctcagtacggtgtgctggctccgctgattgcccgtccccgcccggatggtgacggctacgagatcatctccgggcaccgccgtcagtatgcggcgaaacttgccgggctggataccctgccggtcattgtgcggcagatgtcagacgatgctgctgtgatattgatggtggacagcaaccttcagcgtgaacacattttacccagtgaacgcgccttggcgtacaagatgaaactggatgccatgcgaagaactagcggtagaccgtcaaaagaaaatgtgtcccaaattgggacacaaaaacgttccgaccaaatcatggccgaagaacttggtgaaagtcgcaaccaaatccagcgttttatccgcctgaccaatcttatccccgaactgctggacatggtaggcgaaaagaaaatctccttcaatcccgctgtggagctgtcctatctggacgaatgccaacagcgggattttttagaagccatgcaggacacccagaatgcgccgtccttatcgcaggcgcagcaactgaaaaagatggcacaacagggagagttcagctacgaaaaagcctttgatgtgatgggacaggagaaaaagagcgagaaagacaccgtgaccatcaaaaacgagaccctgcgaaagtattttccccgcagctacacgcccaaacagatggaggagaagatcatccagcttttggatgcgtggcagaaaaagcagcagcgccgcaacgagcgctgacccgtaacgcaagacccgatagggtctttttgtttgcaaaaatttggagactaactattaaaagtcaagccccaaaatgaaaaaatccgtctgccgaccgctgcccctgacaaacagcattcacattcaactacaaagacggcacaaaaaccatcactttcgatgaaatcgccgccaaagatgccccagagggcaatggttcggatttgggttgcttcgctccaccaagaactccggtatccaatgggtaccggagtttctgttttacctgccttgaaaaaggggctgcaagggtggattcgaacagcaggctccatgtgtgtgaccacaagatagtcggggctgcgcccctccaacacccgcgccacattggaaagccattcttccgccgcccgtgcgtccacgctgtccatcacggcgatcttctcatccagaatgacataggagttgtagctcactcccataggctggacggagtactggttttcaaagagtgccaatgttgtggttggcaaacccacactctattctacggggaggtttctctttgtctagggctaaagccgtttttattccaccagcaaagctggtggttgtcgctcgctcaagctacccaaaagagaaccacctagaaacgcaaatttctaggtggtttttgtcattcataacacactatttaacacactttcggattttagcgtgttttatccctgtctgatctcgattttccagccctgtttttcagacggcagcggttgcccttccttaccgctattcatgcgctggtcaatatctgccatctgcaaaaaggccggttggatttcttcaagccagcgatagccaacggatgtatgacagcggggacagcagtcaacaaagccgtcaagctctacagctgccacaagcggatagacaacaaagtttttttgcaattcgggcaggtcaaatgcatttccagcatgattttacgctccttcgttcttgttgaagataagacggtcaaggctatatacggttgcgtcacaagtatggttgtcccgatctggcacgctgggcaggaagttcctgtctttgtccgtgtcgtattcatattgtgaaagctcgcggtagatgttcggcgtgcgccggggcaaacacaagcatccgtttttgcagtcacttgatgcggtagtcgctcagctgcatactgtcgtagttgagggacaaccccacccggttggtggctgcgacaaacgccttggaaggcgcatcgccgcccaccaccttggcgcgcagcttgatgcccgccgacaaaggcgcggcgtgaccgttctgctccgcaaagagcagggcttcctgctccatcgtcagaccggtgtagaccttgcagaggatcgggcggtcctcgccgccgttgaggaggatgcagccctcgatggtgtgctgcccgtccatcacatagtacctgccgttgcagaagctgaccttcggctcgttaacgatgtactcgttgaagtctctggcgatcagctccacccgcttgcgctccacgccccgctggtagatctcgcggggatagatcagcttgctgctgtggatgaccgaaagctggtacggcgggttgataccgatgaaagaattgttgtcgttcaggcgcatcgcatttcctccttgattctccaaatgtacttctcggcttcctctaagatctcagctacctgctgcttccgcttcgggatggtgagcaggctgggattgaaggtgaagctgtattccaaccgctggatcatggcatgaaccgcggattgcaactcggtgtacagcatcatttcctcgatgtttccggcgttctcaaaagacgatttgatgggcgtataggggtagacaggcggtttgccatccaccacctcaggcggtgcgtaaagcgccgtagagcgccggataggctctatctgctggatgctgcccatggggttcagcgcaaggctgatgcgtactgcatcatccacccggcgcatctcctccggggtcagatgtcccagatacttcagcgcccggctcttgtcgatggtgaagatctgctctgcctgcacgacagacggcatgttcaaccctgcgttttccaacaggcagtgggtcggctggtttactttcttttccgccttgcttgtcatggtcgcaacgatcagggtcggagagtgatagttgcccacgtcattctgaagaatgaccgccgggcggtcaccgcactgttccgaaccggtgctcgccccgaagtgggtgaagaagatgtctccgcgttggaatttccagttttgctgcaaaattgtacctccatgttgttatgtgcaaagcccgctgccggatgttccgcagcgggcttcgttcacggtatggtggtatggtcgggtcagcggtgcatgaccacataatcgtaaccgcgccgcatctggcagacggtgcaggtgtccatgctccggtctgcgctgggtacaagcgcgatcttgaaagcctttgcatccacaaagtgccgcagacaggtgccgcagagggtgcggatggacttgaccatctcaggggtcagctccatctcctcgtagatctcctgctcgcgcaccgtggggttcaactcatccataaaagtgtcctcctatatgtatcaaagtggatattcgggtaaagaataaattgggatacgtaaaaaacgggaactgccggatgcgcaaaacgtacccggcagttcccggatcaatatgattaaaggtctcgcatattcgccctcggccccctgcgagtggggcataaacatctggcagcggacttgtaccgcttcattggcatttcagccaccccgtctgctttgtgannnnnnnnnnaaatcgaagtaccagatgacggaactattcagttttcaaggaccatgaagtcggacgctttgccctgcggtgagtgccactcgggaaattgtcccttcacttacgaacccagttgaaaggtcaatctgcaccctgaaaatcaaagtttttcaaaaaattagtgattttaatgatacgcttacttatattctggtgggcaatgccataagctttagataattccaccgtgctatacccctcatagacatagagcgtcaaaagtttaaggtcatcatcagacagcttctctaatccgacttgcaggcgttcgttttggacttcacccacccacgcaaagcgcgttttcgtttcgtgataggtgtccgttacggtagtggctcgcacaaagtcagcataatcgttccgattttcggaatcgtctgcactcggaatctcaacatcataacgatggtgggcacgatcatcattgaataccgccagatcgtactcatacatcttctggatagcgtcctccttcatgccagcagcccggtattcttcccggagcttgtcccatttagcatagaagttacggcgggcatttccgctattgtagttcatataaacctccaaattttcgataaaacgtaaaaagtcgaaaatttggaaggctagcgataaacaccgcaggggttcacagccatgcgctgcttgtagccggagatcttcttctcccgcagcttgtctacgcagttcatcacgtcagtcattttcgtgtcctttcccccggactcagggaggggaaggataccgatgacggagactggataggggttcacgccgtgcactgaaccagcctgcaaaacgcaaaaaggcccgattccagagatgggaggtacacccatagaccggtcgttctatcgcagcagacagcgtctgccggatggtaaaactccgttatggtatccttaaccctctctagaatcgggccttacgatatttttgttcttggggcttgtcccttgaactgactacatgataaccgagaacacctcaaatcaccagttcatcagatgagctctaaaaagcagcgcacaaagcatcgttatttcgtacttttataaaaagtaccgtcatgtcagatgctcttatgcagccttactgcgccgttttattaccgtttagggctcacttcttgagcccttacctcagaaaaaatttcaaaaaaaagaggcgaccagaccgttttatggtccaatcgcctcataggtatattctgttgtgtccgcattaacaggcagttttgagtggcgcacatccacatgctgcaaggcagacattgacttgttcgatgccctctttgtaatactccgtcagaatcatctgatagacagtattctcttgatcgttgaaatccagcgtgattttgcacatcctcaataaatcaccacttacaggtggcggaagatgcagtgccaccgagatggcaacgatctgctccacacttgcatcctgtcctgcacgaagccgctttaccgtagatacagagagcccagactctgactccatctgttccacagacatatcccggtcgttcatcagcagcttcaaggcctctccaaaccctacccccgaaatcgttctgcgtattgccaacgaccattgaacctcctccgcaaacgcaactgcagctgccaatccctgttcggcagttttctgcggcaactgacggcaaaccgagttggcactgacggtttccaccttggtatccgtattcttatgtacaccagatgccacctcggttcacctccttcaccaaagtttttataaaaaaagaccggagtaaattcagatcaagttgcctacgcattacttgtttccaaatctactccggtctttaagcctgttctgtaaagactggatggacatatccaccggatagcctatagcgtcttctggcaagtaaacgcactccaacctacatagagtagtcaagaatcatatatcccaatgggttacttttaggaatttctgaaacttgctgataaaacttatcagctaaaccaactatgtaatatctaactgagtttacatcccttgttttccgtttgaaaggaatgacggttcaagcggaatggctacagacttatctgagaatactcctccttttttcggattattattcaactgttattttttctttgacttacggctatttttacgtttacagtataacagccaaaattcaatccgtaaagagaagcaattgcttttcatcgaagcgacgagaaataagtcggaaaattgtgtaatctgccaattccgatcctataaacgcaaaaaagccggaatagactcctaaaatccgaaataatttcagatttttgaagtcaaccccggcttactacccattcgagcagtaccaaacaggcaacaattcagttttaaactggctcacacggtcccccgatgagccaagtgtacagattcgcacctgtcttttcctgtccttatcctcaaacagtgcaaatgagccgtgtatccttctccggcagggagttgaacacacggctcatcattttaggttcagaatctcaagatactcgacaatcctatgccgtctctcgggacagtgaatcagttcctctttcccttaagtactcgttcacctcatcaatcgatctcatatacatacagttaagaatcatcgaatgtgctagctgttctttggtcgcagccaaactaaaacccgcttttgctatgagcgcaaacgaaagccatggaggaaggtgcatagcaacgcatagtgcaaccacgtttttctcagaaaaacttttaacctttccatttctgtagcgaccgatcgttgactcagacacctttgattcaaaggccagagcctcttgcgtaaatccgaagcgcgtcatcacatatcgtagtgctgccgggaagcaagcaggcatattcgctaacaccttgcgttcttcttcagccttctcattctcagacagccttccttccgggtctataatatgatagtagtttttgatctctgtttgatttttttcagcatgcgagggcatccaaatccctcccacgtccgaaactactcaaggtagcctcaaacgtgggaggaatgggcatagcgatgctcattggatcagtagtcaaacccgcagtcgcgcgactggccttcttgactctattaacccatagcatatgcaattgcgcataagtctgtgcacacttagcctttctaatgcgtctgatcagttctcgcatcctttccaattcgagaattctttcataaacgcactgatactccacagaatccggttccagatcatcagcaatatgaagcaatgactgaatccgcttattgattctgttcatttcttgcttcaaacataataagctgactgctttagcaactgcctcaaaaactgagccagttgctgattttcgacaaatgatgtacatttgcacattcacctgcccttttcatgtagtacggtaaaccgccagttttattatatcacattccatcttaaaactaaatatgtctcgttttcttattgcttcgccatcttctccttagccttgtccggcacgtcgatcagaccaaagcggtagaacagcccatagatatacgacacaccccggatatctcccagcgccttgggtctgtccactacctctccgattttaccgatattgtgatacgccagcagcacagaactccaagcaaggctcttgctgccctctctacggttgatccacagctccttggtgaatccagttcccctgcccttcttcagtgtatatgtaaagggcaagcctgacatcgtcttgaacttgtatccccgaaaagccgccacgcacttccagaggttctcttcgcaagggttcttcttcagcgcagccacagctcgatagtgacgctgtctctctgcaccggtgctgatattggaagcgtcagcctcctccgggaagtacacgcctttctcatacggcagataggaggtcacagaagggcgggacagctgcaaagccgacatagtggaggtaacagcagcagaatagctttgtgtttctctgaaggcattaaaggtctgctggacgagctttgccgtgtccgactcgtagaccccggctgtaatgagcagcttccgaaccttgatagggttgagggacaaagcgtctgcgatgacttgcaggctcattttgtccgtataaaggtcagcagctgctttcatctgctgtgctaggttcttggctgcgctgtattctggctttgatggcttccgcccaccgccgggcttgcgcgcgcgtgtattactcactagttttcacctcgtttttatttccgtcacaaactatatatcgtactcgagaatatgccgtgtgaacttctggatttcagtccacacggcatattgctttatttcagcttttcgagaatctcatccgccgtcataccggatgccagcagtttcttcagcacagcctcagcctcaaccttcttagcagcttcggcggccttcgcctcagcggcaaccttcttagcctccagctttgcgatttctttttcggtctgcttaatctccgctttctgcggctttagactttcacgcagagacttgatgtcggtcttcagctcttcaatctaggcgacagtcttggaaagaccttcttcgagcatcgccttgtctttctgcaactttgcgatctgagcatcgaaatcggtagatgcggtaatgcggttcttgctgcctttggttctgggcataggatgatatctcccgaaagaatatgtaagatttgatgttagtatagcactgtgggaattagatggcaattcttgctgtatagcgcatattagtatttatcctgccaacattggcgcaacaatagccttaatctgtcccactgtataagcattagaaaccaaaatatccgcaaactcattcaacaccacttccttgggctcaccacatgctgcagaaagtttttcaagcactacatccatcttctgcttagccctttttcgtggtttaggggaattgcaagaactatattcattcgaattaactattattgacggctcagtatggaatttcgttctaatacgattaactatattagcatccattccctcaagcttttcaatcatccatacttcaggcgtgcagcccaaattaaagataaatctgcggttttcattataaaaacgcgctatctcttcatcattcggaatcgtttctgtaaatacatctgcatcccacactgcacagaccacagacctattcaaaagttgacttttcgtatttattgccaattccgccgtttgtttgtagcctccaacaggaacaatgcaattcgtaattgttttaaatctattatcctcttcgcagcatgtttgtatcattcgctttagcaatgttcttgccatgtcatcttcaacaaagaatactgcatcataaatgacattgtcgataaaatccacatttccgattgcctttgccggatagcatggacaaaccgcatcatatttcccattctcggcttcttcaatcgaaataatatgatttttatctgcagactttatcatcgttacagaatgggtagaaataaaaatagttaagttcttttgttgcgccacttcaactagataatcatataacttcttttgtacccgaggatgtaaagccatttctgcttcgtccaataacactatggcatcattttcaactgtatttagcttttcaaccaacctaagtagtgctatttcacccgtactgaatcgcttttcggaatagtactggccacgcctttcctctatgacataaaagaatgttgcatgtcttcctcttccattggctatcctcaacctcttaagtctgtcaaatttatctgtctcaaaaatacgattcaaattgcgcttaacgtcaggatcagcagcaacaaaatttcctcttcggatttcttctttaggtacatcaattctattcgagtccgctcgaataaacacggtctgcgtatagccaaaattatccagaagattgctatggcccttaggtgaaactgcccaacggctactcttttttctaaatttcagtgatgttggtggattatctatgtcatatgtaatttcagcttctgcgtattgatcaacttctccaaaacttctcgatgcgctaaatcctcttgcaaaagcattcttattacagattctatctatacagaccaatagagtcgttttcccaacaccattaggccctacaataagatacacacctttcgactgtggaaaaacgaattctagatttttaatatttttggtcttttttatagtgatttttttcataagtactaccctatcattaatcgactatattgtttttgcatcttagccacattctcatgtgttgcctgtcgctcaccgcgtagaggtgtgcaaagtttcgagcggcaaagctgtgaggggggaccaactggtaattctcacagctcaaattttatgccaccagctactggccttcatggataaaaacaaattccgacatacatgtttctacctgtactcatcatctacactttgagatggaaactttttaaacgagcaatatttttaagaatttccattttcataaattcgatgatatctagagaaagcatccaggagctatttccttttacccgcctattttacgctaaaacttagcttgagattcttaatttagttactttaaaaagccatccaaccctaatctcaaatttcaagtgctacacgatttaaattaatctcttaaatcaattaaaatacgatccaatacggttctatcaactgaagtcggcccaaattgaattacgcgtggccatcgttcatccttccatgttgttccatacttaacaagttcttttgaataacgtggaaacgcatgaaaatgaacgaaattatctcgcatcattgccgcaatataattaaatttctccgcaccaaattgttctttacattttttttcaaaccaattcattgcactcgaaagctcagcgctctcctctggaagcatttcgccaaatgattcacactctctttttaatacaaaaatacaatctcccaaggtgttttgaccttctcgaagaagaattagccaatactgaaactctttaacaagattaacatccggattaaaggcttccataaaattggaatcacttttcatttcattttcctccttcaattttcaatagtgattcaagtggcaaattataaatttcgtcaactcctttaccatcattttttcctacgcacctagcaatccccaaaagtccccagtttatgtatgaattaatactgcttgatgtataaaaatattcttcagacaattgataaaccaatggaacaataattctaaaagactcatagtctttaagcaaatttctactattgggcatcatcgtgatacgttgtatcagtgcatcatcaatcctaagtttatcataatttagcgaaccatcccatatgtgaggatatgctttttcaatccgccaccgttgagacacgccaggatcaacttttgatttaatacagttttcaacataaattgaggttaatcccaatatatctcttgatgtatcattaccagtgatctactttcaaaatcaacataagcatctaataattcatctgaaatagcttgagacataagtgagtataaaaacaaccgccgatacaatttaattccaatctttataatgtcaagataatactcaatactatcactattctctttaatctcaatcgctctcaaagtgctccttatttcttgaatagcccgctccctttcatgcgatttttgaactaaccattccggatttttaagaacaaatttgcatatgtcaacgttaagtggtgcgcctttaactactatggctccaaagccattctgaaccactgtagcttccggcaatccaaacaagaaatttccgcttttcccaaatactggtgcgataatatcaaatctaagtttttgatatgcacgttctggccgcgggcaataccattccctatttactgaaatatctgtcacttcaaatttttctgttgcaattgatttgtaaattgttccatgttgactatgagttgctgtttttccttgtgaaatttcattttcacaccaatgcacctcacctttttccccttcaataacaatttcctgtccatcattaataatgctaaccgcatcctttattctaagtacacatggtattttaaggcttcgcagtattccagcaccatgacttccaatatttcccgattctgcaatgacccctactacattcttactcaagctaactaacagctttctatctaaggttttcataataagaattgtaccaggggcaattgtttttgttgcaaacacgctatcaacaatgatagccttaccacgtacagagcccttactaacacataatcccttcatttgtaactcctataaaagttttctaacctgaagataatatatcacattattttctatttgtatttccacctcaacatgtgactttagtaaatcttctaatatctttatagaattatttagttcaatcacaatatccataccaaatggaactgtctccggtttctccacaatcctgttgtctctactcacactgatgaattccgcatcaattgttccatcaactattgcagatgtacttccagatgcatattcaatcaacattataggaagctcgtttactatatcgaatgattgtatcaccgcagcaacctgtcctgatatatattgttgaataatcaccgccatttttacgctatctttgttaattcctgttaattcataatacccctttgctttttcgtcaagcgaagaatcccatatgcgcttcaaatattggtacggtgcattttccttttcataaacaaacgattcaaatacgcctgcacttgatgtatcatcagtattctctatgtttgccgaagaacgaaaaatcacctgcttcgttccaaatttagaatcgatagcttttagtatagctctattaagctgttccgagtcatcttttccttgaatatagtttccgtagggtattgcatttaaaacgattgcatccggcacattaaagccattcttcttgagaagaaacaaataatgtgctttacccccacacaattcttcattttggcatatttcgctcaactcaatcaaattcttatacatccgacattattcccttagttcttatttggtcgattttttcttgtagttgtttcttttcttcctcatcaaagctgctttcgaatttctgatatagcattcttatttgttcaatatcagttatattaatcgcctgttcccacaattctttaaaataccttatataataatatgctatttctttattttctattatataataacgtggtgtttctccttcgctgtagggacttctagtcgagataaatcgatcgtctattatgccgaaggtcggaaatgaaaaagtctgcggcagttcataataagcataaaaagaattttctttctcacttccagctagtagtcgatccaaaagattggagtaattgttttttctcacgcgtactatatgtctaaacttaatattttcattcttacagcaatctgtaatatggttccatattctgcttctcgaattaggggatttggttctcgttgaagaatctaatgacgccgtatctacggtatgttttccgttcttgacaagcaattccattgcgtcaacccagtcgctgctgttatcaaaaaaacgaatctgtgtgggtgaaatttcagatacaatattttttaaatcattttctatatttctccatttttggtcttcatccatattatccagtataaatgttgtcgaaataagtatcagcaacagcagaatcatatactgatataaatccaccggtgcttttatggttgtatacacaagatatcctatagcaataaaaactgtaatgtaggacacaatacgtttaagccacataaccatatatgcctgcatcctttcattattattggaaattaaatattttatagattatattcaaaaagctatacaataggaatcctatataaccttatttttatagattaacaatatacaatctttcactgtgaatatactatgctcaacttgagatttcgttttttcatttctatttcatgtatttctctgcaaagtcataactcccattacctcgactcgtatagctactcgctttagaactaaagccaaaagcataccataagcaacggcgacaaaaccgcttatcttatcatctacgttataggagcaagccaatacacaaactatagaagcaatcccaaagatctcaattcaactaccctaactaaagcatctttgctacattcccatgtgttatctaccgccaaccacatggagggatacaagatttcaagcaatgaagctataagggtcacacctctacaattcaaatatatactatataggcttcgttttcaaggctaataggcaaaatcggacatatatacatccaagtgtccgtgttaatcatctatactttaaggcagaggtgattataaaatgaagtttactttcaaacaattccatcgtcaggattccgatgatatctgggaagacatcccagagaagcgtcctcttaccctcatcatcttcgatctgctgctctcccctacataccgcttaccgaggaccgtaaacacagtccggatctataaagactggaactgcttctcggtttgccctcggtgcaagaaagtcatcgaatatgaataccagtcttactgcggcagttgcgggcaattcctcgattagtcaaaactcgatgatgcggaagaagaattcatcgggtggagcggcgttgaagatgatagctgattttccccttgcaccacgtcatcatggtgtatgctgccagcacaccgatccaactgcccatcgtattaccgaacacatcatcgcactctgcgatgccaagtcccgtaatatactgggttgtttcaattgctacagacataacgaagggaatcagcaacacccatttcttctgaaacgacctatatagccccgttccaagcggaatgaacagccagatgttattgatgacccccactctcacagattgctctttcaagaacttcccagcataggaaaagaggacaaagttcgtctttgcttcccctgcctcgcggaacatcagtgtttcataaaggatgaaagccacataaacgatcgtcagtactacgcttaaactcttcggaagaacaatcatcagcaaacagacaacgcagccaaaaacaaccaccatgcatggtaagccattcagaaggttgtccacacacagcatagcgttgccgtttctgtcaagcagaagattcacctttccgctgcgcttgatgccatactgtcctttagacaatgcctttgggttgacattcgcatcaaaatacatatccatgtctgctgtgccatctctataataagtgcgtttgaggatagtatagcccgcattggtaggggcggggttaccatctgcgtcaagataggtgatctggctgatgtatccttgctcgttgcgctggtataactcgccatactgaccaagcgaagacctcgcagaattcccttctgtgtcaaaatgctgctcaccgacaacagttccattcccatcacgctggtatgtcttaatcgcatatccagatggtgcacatactgcatgtccatctttatcgagaaaggtcaaactggtattctggccatcagagctatactcacgatgaattccatagtatccgccggagcactgtatctgctgtccgctcaaatcgtagtagaaatcatcgtaagccctgccaccagactgcgttctgattatagtagagtatccgtcactgcgttctatcgggtttccctcggcgtcaagatatgttatcacagtaccggttttatcgtattcatatgataagccgtaataatcgccatatcgtgccacagttcttccgcttgcatcaagataacgttcctctacaactcggccgttatcatcccgcattctacacacggtcgcgtagcccatatcaatggcatctgtgattcccccatcagaattcacatagcttgtactggtcacgttttcatctacggtttctcggatactcagctccgaggcagtgtatcctgcatcgtggtcaacatccgcatcaggcaacaacgccaagatagaaagaaaagccacagatgcaatcagcaggattccgcatccttgtttcaagtttgtattcaaactccataaccccggctcttgatagtctctacgacctgagacacatacttctggcaggtgtcatggtcaggtgcttctaccatcacgcggactaccggctcagtgccggactcgcgcaccagtatacgaccggtatcgcccagtgcttcagccacagccttgactgcctcctgtaccgcagggtcgttctgcgcagccttcttatcggtcacgcggacattttccagaacctgcggataaatcttcaggggttcagccagtttgctcatgggcattttcttcgccagcattacttccatcatcttcagactggtcaggataccatcaccagtgctggcgtacttgctgaagataatatgaccgctctgctcaccgccgatacggcagccgttcttagccatgtactcatagacgtacttgtcgcccacagcagtcttggcgtagccgatgccctgctcgtcaaaagccttgtacagaccaaagttggacatgaccgtggtaacgacggtattggtcaagagctttccacgctccttcatgtagcagccgtagatgtacaaaatgtggtcgccagtgacaacattacccttctcatccacgcacaggcagcggtcagcgtcgccatcgaaagcaaaaccgacatccagaccgttctccaccacgaacttctgcagaccctcgatatgagtagagccggcattgttgttgatattcgtaccgttaggctgtgcattgatgacgtaggtgtcagcacccagcgcatcgaaaacactcttagcaatattccaggaactgccgttggcgcaatccaaaccgaccttcacgcccttgaaggagtagattccgaggctgatcaggtatcccatgtagcggttacgaccagaaacatagtccaccgtgcagccgatgtgctcacgatgggcaaagggcagttccagccagtccttatcgaacacataaagtttgccgtcgatgtagtcttccaccagcagtaagatttcctccggcatcttctcgccgtagcagtcgattagcttgataccgttatcgtagtaggggttgtggctggcggaaatcataatgccgcaatcgaagtcatccacgcgagcaatgtaagccacagacggggtcgtggtgacgtgcagcaggtaggcgtctgcgccggaagcggtcagaccagcgaccagactatactcgaacatataagagctgcggcgggtgtctttaccaatgacaatgcgggcaggattcgtatcaccgttgcgctcacgcagagcattgtaataccagcccagaaaacgaccaaccttataggcatggtctgcggtcagagtgattccagcttcgccacggaagccatcggttccaaaatactttcccattataatttttcctcatccaaagagtgaattgacgaatatatgctttagccgggagagaatcccgttgcctgccatccgccacgtagaggcagcatatcaggatggcgtagccatgctttgagcatggctgcattgtcttatcttatcaatttattcgttttgatacgtttccagctctgcttgatattttttagcatccttcaaaaagctcgccgcaatcatcacgatgactgcgccaatcgggaatgccgccacgatgctgaccgactgcaggttgttcatagagctttccgcaaacagcaatgcaatgggcaacagaatcagcaggatgcaccacatcaactggatgcccttattgggctgttcatcatccttgagggtgtggtagctgtagcaggatgccgtcagtgcgatagaatcaaaggatgttgcgtagaaggcgatcatcgtaatcagaacggccaccataacgaccggtgcacccggcatagttttgatcatatccacaatcatgccgtacatatcgccgttttccagatacttcgcgataaaatccgccttgtcagtcatttgcagtcccatggagtagttacccagcacaatgaagctggtcagtgtagagcccacgccaaacacatagccgcccagaattgtctggcgtaccgttctgccacgggaaatgctgccaataaagaacggtgctgccacacaccaaaccatccagtaggcccagtaataaatggtccagttttgggggaagttggaggtacgcagcgggtcggtaaaggtggaaaggtcgatgaaattctgcatcatccgtcccagcgaggaaaaaccggtttcgataatataccgggtctcgccgccaaacaggaggacaaaggcaagcaacccaaagaaaagatagatgcagacattggccaatttgctgatacccttgaagccatgcagcaaagagtaagtatatacggcgcaagtgatcaacaggatgataatattgatgaccgtgcgactgacagcaacatggaatagctctccgatgatggttgccatcagcggtgttgctacgctgaaagtagtggctgtacccgccagcaaagcgaacaccgccagcaggtcaatgatgcgacctgcccagccatcggtgtgcttgcccagaatcgggcggcaggcttcagagtatttctggcgggttctttttcttacgtgcagcataaagccgaatgctaccgccagcaccagatagaaaccccacgggataaagctccaatggaacaagggatatacccctgcccagtcctgaatgctgcccatctctgccagatgggggtcggttgcatacagcacccattccgaaaaagagtaaaacaggatatccgcagcaagaccgcaagtaaacatcatggagccccatgcaaagaaggaatactgaggcttttcgttgggttcacccagaacaatgtccccgtacttcgaacacgcaatgtacagtgacaggatgaaaatacccagtccgatcaccagataataggtaccaaaggtatctccgaaaaagaaccggatctggctcagcacggcattggactgttccggtgcaaagaagaacagaatgcacagggcaatgataatggtcagtgggagcagcgttatcatccaatcaattttcccacgctctctatttttgttcatttatgcttccccctcatattttttgtagctggaatccagagcagccagttcactgaagttgtccacctcgatgatatcgtccttattcatcggacggattcccagttgatattcttccggatagcagaataatgctacatcatcccagtagatttggcgattctgcttctgctcaaactcgatttccagatggcgtttcaatttttttccatcctcggctgtccagcgagaaatgctatataactgccatccacccttgccgccggtacggctacaagaggtcacgattccatcttctacagtttgcagccactcgtccgtttcctcgtccgtccatacgctgttgtagccggaacgctcaaactccggagccagaatatccgggttatagataatttgatcgccatccaaaataatcgcattttcgatgtgatctcttgccacatacagggatgcgatgttgttgcaggtatcaaagtaggggttttcaatcagtcgaacgccgggatactctgtcaccagcggagcgaactgttctttcagatagcccaccacgatgtatatctccgaaatgccgtttttgtgcagtccctcaattaccgtatcgatcatccgcttgccatttactttgaccagcggcttcggcgttgtcagcgtgaccgggtgcatccggtttcccaaccctgccgccataataatggctctttctactttaggcatttttctgtgccccactttcccctgatttcttcagttcatcctgaacgattctgtagtagtcttttgcgtagcgatactgccgcagggaatactcgccaaattccacacccagatttcgcttatactcacaccagttgctccacagcagtccgcaggcagcgatgtagcagtaaatcttgatccgtgtcgcatcatcgcaaccgtccgtaaaatatgccgcaatcaagcgatctacctgccgcttgttgtaaagcgaataaatgcagaacattgcgatatccacatggggatcctgcatacccgcatactcccagtcgatcagacgaatttcctcttttccatttttctggacaaacaggaagttatccggtactgcgtcaatatgcgtcaaaatcttctcaccagtgtgagcatcaatataaggcttcaaagaccagacattcgccttggttttctcatagtccttgtaaacagaaggcattccatcccacagcgtttcgtagaactccatctgcccgaaaatatcaaactcatgcgcaactttcagcttcatcgcatggaaatcacgcagacggctcatgcacttcttgacatcttcatagtcggtagggtcgcatacccgggcgccctccagaaactctgtgatcttatagccgttctccgggttaatataggcgatatcatcacagatgtttttatcagcaatggcatgatataccgctgcttcctgacggcggttgataagctggtctgtgccctctcctggaatgcgcataatgtactttttgtccttacaggtaaacaggaaggaacggttggtcattccctttttcaggactgtgatgtccgtgacttcctccggttttgcgcataatgccttgcagattaaacgaatcgcatccgttttcagttggttggaatcgctgtcgatttcacgaagctgctcataggtgttgatctccacaacatctgtcgaatgcaccacccgggctgtgacgatcatgcgatccttattatagagtgcttcttcccaaaacaaaccatcatactgtggttttttgcagagttcctcgatgcgtgcagaaaccgtatcggagtcctcttttgtaaggtagctgataccgatcatcgcattaccaccgacattttccggcacagttaccagctccatcttgcggttcacacggacattactttcgttttccacaagatcgctgaccatataccatgagtacagctcatgacggtgaaacggattgcggtcacaccagatgtcgcaagggacgatgtacgcattctccagatgctcttttaccaatctgagagaatgcagattgttctttgcggcatagtccgggttaaccaccagttctacgccatactcatccatcaggtattcatatttttccttcatgaaacccacaacaacatagatttcctgaatacctacttcgtgaagctgcttgataattcgctcaatcaaaggctccccgttgacttccagaaggcccttgggcatttctgtattgatgggaaccatccgcataccaaagccggctgccagaataattgcacgttttggagtcttattcttgtattccgcaacagcctttgctgtggggcaaatcgcttcgttcagataccctgccttaatgagttcctttagggaacggtttactactcccaatgaatgacccgaaacctccgctaaaacacgctgattgatgaacggctcaagcagcagagcgttcagaatatcgctttcttgtttattcatgtacactcctccatcgctttttgtgaacgcagtgctagcgtgaaaccacaaccctctgttatggcttcacttctatcaaattatctttaatgttcttctgttatttttgcatacactttatttccatgatgtgcaatctgctttgaagttggaggcggagtcatgtagtcaccatactgcttcgttagaatcatatcatatcctacaggtgcacttaatagatagccctcaaattcaaccggaacctgtgatgcatagcattctttgggatatcgatcatcaaaaatgtcgtccttagagcaattgcttccaacaactcttgcggattcataattcacctccgtctctttcaaatgcatttgctcgagtagccattccttcttccagcttctgaaaaaggtgttgcaaacttttccgtatgcaattgttgaggcacgcttaatcagctttaaaacgctcctcaaatcaaaatgaagatcagccgtgtataattgcaatccaattacttgatatttatgatacagtttcttctttgcattatacgcagcagaatacctttgatcatcctcataaagtccgtcaatgggaaaaacgtcaatgtcaattcctaattcttcaccctgtttgcactttacgccgttttctatcttgactgtatccaagtcgcacaccttcataaaggtatgttttgcattaggactattcggcataattgctacaatgttatcacttcggtttctgctgttaaaaagggctgcaaatttctcataatcaggtcttggcatctgaatgtcgacatcatcatcccacggtataaaccctttgtgtcttaccgccccaatcaacgttccataagcaagataatatttaattccgttttcatcacaaaaggaggctacttccaataatatatgaagcgctctttgcttgtgttcctcaaccgaaagctccttccatgtggcaatatcattaataccaccgttcatcaggtcttcctccacaccatcttattgaccacattcacatagccctgaatgatgcgaactaccttcatggacacggtctcgtccacatagtcggggcagggtttgcccagaacacccttctgcttcatctcaatggccatatcggtggcattgagcagctcccgtgtggtaataccagccagaatgaagtcgccggcttccagtgcctcaggacgttccgtactggtacggatgcacacagcggcgatgggatgaccaatagacagatagaagctgctctcctcgggcagggtgccggagtcggagacgattgccagagcgttcatttgcagcttgttatagtcgttgaagcccagcggctcgttgacccggacgcgagggtccagctggaagccactcttctccaaacgatgcttgctgcggggatggcaggagtacaggatgggcatatcgtatttttctgccagcgcattgatggcagtaaacaggctcaggaagttcttttcggaatcgatgttctcctcccggtgggcagacagcagaatgtacttgtccttctccagtcccagacgctccagcacatcgcttttctggatcttctccagattcatgtgcagcacctctgccatgggagaaccggtctggtaggtgcgctccttgggcaaaccggtatctgccagatacttccgggcaaactcggaatagcacatattcacgtcagagatcacatccacgatgcggcggttggtctcctcgggcagacactcgtccttgcagcggttaccggcctccatgtgaaacagggggatgtgcagtcgcttcgcagagatggcagacaggcaggagttggtatcgcccagcaccagatagccctccggctgcaattcggacagaagctcatagctgcgccccagaatgttgccgcaggtcactcccagattctcgccaaccacgggcaccagaatgtcagggccaaactctccgaaggtgtttttcagctcgaaatcctcccagaacacggtggagaggtttctgtcccagttctggttgtagtagaccacgcagcagtcaaagtattcccggcagcgtttgataaccgcagccagccgaatgatttccggacgggtgccgcaaccaatcatgaccttggtacgcccatcgtttttccatgtaaaatcgtgttccataaaattctcctaacgtcaaccagtagctactcttacaccggctcgaagaaagtgtccgggtgtttggggttgaaaatctcgttgcaggtcatcaccgtcaccagattctccgtctcactcaggttgatgatattgtgggtccagccgggaatcatgtgaacagcctcaatcttgtccccggaaacctcaaactctaccgtttccccggtgttgatgttccgctcttggatcaaaccgtgaccagccaccacgatgaacagttcccacttggagttgtgccagtgctgccccttggtgatgccgggcttactgatattgatgctcacctgtccgcagtcggcggtgtgcaccagttccgtgaaagaaccacggttgtccacgttcatcttcagggcatacttgaacttgtcggtgggcagataggtcagatacagggagtacagcttcttagcaaaggagccgtccggcattttcggcatcatgagcgtagtcggctgtgccttgaactcctgcagcaagtctacaatctcgcccagcgtaaccttgtgggtcacgggaacacagcagtagcgaccgtctgctttcagaacggtttccacaccgtcaaattcacagtgctgttccttgccctccagcaagtcaaacattccttctacgagatcgtcaatgtacagcagttccagctcggtgctgcggtcgttgacggtaaagggctcgtcattggcaactgcccaacagaaggtgctgacagcactgttgtacttggggcggctgtgtcccatcaggttcacaaagcgatagacagccacctttgcctcggtctcctgagcatactggaagaacagctcctcgccagccttcttgctgcggccgtactcgctgttgccaaagcggcctgccagcgtggcttgaatggaggaggacagcatgatggtcgccttgttgttgtgctttttcaggcagttcagcaagtcggatgcaaagccgaagttgcccttcatgaaatcctcaggattctccggacgattcacaccagccagattgaacacaaagtctgccttacggcagtactcatttagctccgccggggtggagttcaggtcatactcgtagatttcttcaatattcaatgccgggcgggtcttatttttcccatctcggatgtttttcaggttgttgcacagggcggttcccaccatgcccttggcaccgctattgtaaaacccaaatgtccgcgaaatgttacagcggccaaaaaatttcattgaaaatcgggggtgaaatgttacaatgctcggacatttccgccgaaaaactgccactggcagctttatcggcacactgttgcgaaaagacttacggcgggcagccgagaatgaccgtccgccgcattctattttgtcggcaacataatggaaaattccgaacccttgcccggctccgaaaccactttgatatagccgccctgccgtgttacgatctcgcgggccagatacaggccaatgcccacgccctgctgttcgtgtacttcttcctcacgatagaagcgccggaagatggcagcctgattgctttcggaaatgcccttgccggtgtcggtcactttgacctccacatacatttcccacagcaccactgacacggcgattttcccgcctgccggggtgtacttcactgcattgtccagcaggttaaagagggcttcggatgtccacttgctgtcatggaaaacggtcaaatcctccgggcagtccacggacacagcgatttcctttttctccgctgcatacacaatcccactcatggcctgcgccacggtatcaaagaggcgacccggtttcttatccaactggatcacgcccgtttccagccgtgaggttttcacaagggcctgaaagagaaagtccagcttatccgtctggctgcggattccccggataaagtcggtgcgctccgcctcggtcatgggcttttccagcagggtgtccgtcgccattttcagattgcttaccggcgttttcacctgatgggaaatatccgatacaagggtctgtaactcctgccgttcctcgtccacccggcggcggttctcctgcatgatctggtaaagccttgccagccggtgtccgattctggcaagctgggtttcgctgtcctctggccgctggggcgcttcattcccggcgatcatgtggtctaaggtctggcacaggtcagcggtaaactgcgacagccgctttccaaacgcctgcgtcagtacaaaaatccccacaagggcgcacagcagcagcgtcccgcctgtcagcagcaccgcaatctgttttgtcacaagaaacagggctatggtgatcccggacatggagaggacaagctccattgccacccggccaaacagccgctttaccgagaggttttgaaactccacgtcgctcatgcggatgatcttcacggaatctttcttcgggggctctttcagcacgatgcttttgaaataattgcggttcaggatctctgcccggtgcaccagaacatcgttccagtctttcatgcagggctgaatgcgggtcgcgctcatggtgtccggcagcagcgctgccagccgcttgcaggcatcctctccagctttatcggcatccagacagaggaataccctctccacgtccgggcgttcagaaagaaactgccgcagcgccttgcccgacaccccgcccagcgacagataattgtgctgctgccagtttttcgggaacagttcgatgaaggacagcaggccatgcagccgcagagtattatggaagagcaggaatcgcgccgggaactgtacgatggcctgaaacggctgacccaacgggagcagacctatctgctgtaccgctatggcttcaccgatggcgaggaacatccgctgatcggcacggcgatatactttcacctgacgaaaggccgcgcaaggcgtcggcggaaaagaggacgccgtcggtgacgtcaagggtcaccatggcctccggccagtgaaccataggcgcgcctacaaaggtgacggtgtgcttgccgaaggagaaggtgtcgccctccttcacctcgatgcactcatgtccgtccacatggaagccgaactgccgcatgagcatgaatgccttctcattggatgtgttcagaggaacgttatttttcttgccttactttgcggcatccaccagcacaccaacgtagccggcagtatccaccagcgtggcaccggaaacggcgtccacagccttttcatctttgctcagagcctcggcgtcggcaatgctcatgccgttcacgtggttctggatggcgtcgtagttggcatccagcgaaacggtggaaccagccttttcggccatcatcttgctgtagtaatcggcgttgacccgcttggacatcagcaccttgccctcggcgtagcctgcgccgaagtcagaatcggagttgggcacaccgacgaccccggcgtccgaaccggcaaactggaactcgtcaatgtagctcagcacgatggtgtccccggcggtggcgacagcgccggaggtgaagcacttggtgccgtgtgcggccccatagaccacattcagcttcaggtcctcggagctgccgttgaactccacggcctgcgtggtctgggcgtttttggcggcatccacgatggcagagagataaccggcggtatccaccagcgttgcgccggatgggctggggtacatccctctggatgaactggaagcaaaagaaaaggcgtgaccgaagtcacgccaaatcttccccatttagggaacttttgcaaatactgttttatgggaactctgctacggggaacgccctgttgtacatatcgttatcgtctgtggtctttggcagggtgcgtcctattcaggggcgcaccctgtttttgttttgtccagagagcaaattgtgccataacatattataatccagcgcagccttcaaaatgtctctactacaccacaatctgtgccacattcttgctaaatgcccacctaagtgggtgccaaaattacagagcgttcctctcagagcgtctgcgccttctctgccagaagatcccggatacactctgcagccgtccacggaacaactacatccggctgaactccgcgctcgtccacgccattcccttctagtgatgccatcgtgcggctgatgggataagtaaagctgaacgcatcgtacaacaccgttacggggttcgtgtaatccagcgtacccatggtgggacgccccagcagcacggctctgccctgctgttttgccaattggacaaaatgttctgcctcctgctcgcaccaggtatcggtcaacaggaccaccttctccggtccgcggtgtagaatgggcatttcggcgggaacgggcagggcttccacctcatccacccagcctttgccgctctggttgcggtaatagctggtccactgctgcgccatctgccgcagcgcgggatcctcatctacaagatagggcttcagcatccggatgagccgggtgcagttcattttcgtgtagttagtgcggatgcgccggtcgccgaagatttccccggctgtggtgtccgttgccacaatgtagggcagcagcggcagcagtgcttcttcatcctccccacgggtcgtgcgcagatcaatcaccagctgtgtgcagccatccagctgtgcctgatgggcctgtacaaacgcttccagcaacaccgcatcgttcagggtaccggggttcagcagcagcgcccctgctcccagttcctgcacagatgacgcggcatccccttccaccgggtagcgagccagttccagcgtttcctcggtgccatcggcatggcgcaccgtgatgtcccgtgccagcttcaggtagccgttccattgttcccgctccggcacatcggcggccaacagcggattgggcaggttctgtacgatgcgctccggcgcagtccggttgatggccagcaccgcatcgcccggatgcaggcgcgtttcctgtgttaccagatccacaaacatgccctccgtgcagcggcgcactgcaaacccacgggaaaaaggggtatagtctgcgtcatgcagggcaaatttcaggttgcgatcccgcataccggcgcagtactggctcaccgcctgcagcaccagcagcgaggacatccgccggtcatagtaggcctgtcccagcatggtgacaaagggtgatgggtcgtgccgcttctgctttgcatcccagcccgcatagtcgttgcgcatggtcaaaaacagatccttcaaaagcttgttgctttccatttccagccctcctcggcggatgtttcggttgcataaaaacggctgctgcgcagtgctctgtacagcagccgtttgttgattcagtgtgtcttttgcggatagtgcctatctgcggcaagctcagacgttgtccacgcagaactgacctgccagacggccgtgcgtgacagccatgccgatggagttaccagcgcagggggtgctgtagcctgtgccatagcggccgcccagactgttgccggctgcatacaggcccttgatgggctcgtagtcgatattcagcacgttcaggttcaggtcagtcatcatgccgttcatcgtgaccatgctggggcttgcgctgcggttgcccagagtctgggcacaaccatagaacggtgcctcacggatggggatcagagcgcttgcatccttaccgaacttgtcatccttaccggcatcgcacatggcgttgtactcatcgatgcttgccatgaaggtatccatcttgtcatcgggtacgcccattgccttggccagctcttccagcgtatcgcacttaaacaccttggacatcatacgctctgccacaaagcagctgcggatggtctgctcctcgctggagcagggcagagcctccatatcatcgatcagatcctgatagtactgcggacggcctgcgttggggccggagtgctcgatgccgcaggcgcagatgctcttcataaagttcttgtcggtgaccagccagccggtagcgttcttctggcgggcggtggcggtggaagcgccggtcacattgccctcgttgcagaagcgcttgccgtcgctgttgagccacagcatgctgttggcaccccagggagtagagttgatgccgccgcccaggatcatggtgccgcggggagccggctcgatcatgccgcctgcccagcacatcatcttcaggctggagccatcacggccgcccatgaaggagaagaagtccttcttcaggccgccttcccgctcgttgcgctccatgtactcgttcatcagtgcccagcacatctccgcattgcctgcgtagtcgccgccgcacatcacaacgcccattttggtgttgtacttgacgatcttgccatcggcgttctttgcgatcacgccgactacatcgccgttgtcattctgtaccagaacctgagctgcggtaccgtagtacagctgtgcgccgtagtcctgcacagctttgtccagctgtgcctgctgcacatacttcagcacgctgttggcggcaacgccatccaccggttctgcactgtaggggcccatgaactggatggttgcgggccaggtgcgagtgccgggcttacgggggtagttagtcatatccagacagtcgtagatattcttgcctgcggcgatcttgtcataatctgcgttcaggtggatgatggtccagccgtcctcagagttatcgtaggtgtaaacgcgctcgtccacacccatctccttgcagacatccagcatgtggtccagcgtctcgccggagtgctgcacatacaagctgacaatgccggggtcagcacggccgccactgcgggtaacgaactcatcgcagatctgccccagatcccatgcggggatgcctgcatcctgtgcaaacttggagttccatgcgccgatatcctcgccataccatgcaaagttatcctcggtctgggactcgatgcccacgacctttgcgcccttctcagcagcgcccagaacagcagccacaccggcgtgacccagacccacgacgcagacatcgcagtccacctcgctgtccacactgctgaaagcaggtgcttcacccagccagtcgccggggccggagtaaccgaacacacgaccgtctgccttggcggcagcccgtgctgcgccacggggatcatcgccgtagctggtgctttcgtcctcggcaccgccggtcagacccattgcctgctggatgcagtctgcggcagcttccttgacagcgttggaggtgacagtagcaccagaaacgccgtcgatctcagcgctctgggcctccatcagcatggtctggaagtcagcggcagaattgactgccagatccagcgtctcgttggcggtatccacctttacctcggtgatggcggtgtcggagaaggtcatggtgacggtgatgtcattcatgccctttgccgtggcggtgtaggtgccggcggtgtataccgaagccccggaggcagccacagacgagctggaggaattgcaggcagacagagcaccagctgtaacgccgctcatggcggcggcagcagcaatcttcagaaagcctttgcgcgagatcttgttcatgagatttctccctttcctgacgtttttcatcgttcttcgtgtcagatatgcgttgcacatatcctgtatttttagtataatgataaagtcttaacaatcggtggtctcatttcttaacaattcttaagtttgttgcgtttttcttgccaaaaccgcagcaaggaagaaaaatagaccatagaatgaagtgtgtttctgataacaggagcgaaatggaatcatgacacaatgtaagatccttgtagtggacgacaacgccgacatccgggagctgctggagattctgctcaccagcgaaggctacgatgtcactctggcttccagcggagagcaggcccttcagctgctgcatccggagctggatctggtgattctggatatcatgatgcccggtatgtccggcatccgggtgtgcgaggcgatccggaagcagagcaatgtccccgtactctttctcaccgcgaaggggcaggaagaggatatttctcttgggctgcgggtaggtgccgacgactacctgccaaaaccattctcccatacccaacttacggcgcgggtcaagagcctgctgcggcggtaccgggtgtatcagggcaagggcgacccggaggacgaggcgtggctggtgcggggacctctgaagatcagccgcacttataatgaagtagaaaagaacggccagcccatcgacctgccagagctggaataccagatgctcctgctcatggcttcccatgcggggcacatcttctcggcgcagaacctctacgagagcgtgtggaacgagccttatctgtactcctccaacggtaccgtcatggtacacatccggaaactgcgggtcaagctggaagacgacccgcagaacccaaaactgatccagactgtctggggaaagggataccgctttggctgatttccgggaaaagctgctccatggtctgcggggcgagctggtgcgcgccatcctgctggccattgccgtatctgtcctgctgtacaatatcctgcagcccatcagcaaaactgcactgcagacctactacctcaactcggattttctgccgcgcaagaccgatgctgtgggcaccatgctccagcaaaacgttgccgaaagcggcatttccagcaagcaggtacaacagatggccgactggtactccaacgacggcaggcccggcggctgcatcctgcgggtggaaaaggatggcatcgtcatctatgattctgccctgaacaacgtggagtattaccgcacctacagtcaggcctccaaaactctggacgaagaagcctatctccgcacctacccgctggaattttccgatggtagcgccaccctttacgtctacggttactttgatttttttgtggacgaagccgtgcgcacctttgagttctggctctgcctgctgctgggcatctgtatcgtcctgtgggccgtgtggaaaaagctgaactacatggagctgctgaaccagagcatccgcgtattggaaggcggtcagctggactacaaggtgcctgtgcagggcaccgatgagctggcacagatggctcggagcctgaacgagatgagtgcttccctcaagcagcagatggagcaggtacaacaggcacagacacagcggtacgatttgatcacatccttatcccacgacctgcgcacgccgctgaccgcccagttgggttatctggaactgctggccgagcaccgctaccagacccccgcgcaacacgacgaatatctgaacaagtgtgtccacagctgccgcagcgtcatcgagctgagcaacggactgttccgcattgccagcggcgaatcccctcagcggaaccccaagctggaacagttgcccgcgccggatatctttctgcaggttttttctgaaaagctgaccctgctggaggagaccggatagcaggtgcagtaccttgccccctcctgcacgccctgcctgctgtggctggacatcgatgctctctgccgcattgctgacaacctaatctccaacctacagaagtacgccgaccccgcacagcccgtctgctttgaggtcaccgccgaagatgaccggttctgcgtctgcctttccaatgcagtgtgcaccactccacagggcgattcccacggtgtcggcctgaaaaacgtcgccgctctgatggagcgtatgcatgggcaaagcagctatactattgagagcaggaccttctgcatcacgctgcatttctcccgataatgcactctgcccaagttagatacatcttttatctcacatacgcaaacccgccccggcttcctgttgcggaaaccggggcgggttgtttactttgcagagctatctgatacacctgtgcagttccgtgccatccggcaggagccgtgtggatagaaggtgccgaaaagcgaaaaataaaaagaagaataaaaatactgcttaaaataccattccagttgcttttggaacagcatttttcttaatcttctaacccatggctcccggttacgtttttcaaatattccttcgggtcgccgttcagaatcaaatccgcatagcccagtgggtcattgtagataaggtagtccagttccgtctgctgcgccatggtcacatccagtgcatcctcaaccccggtacagtcaatggaaatttttcttccatcccggagctgcagctccacgcatccggtgtccatgttgaaatgacaaactcttgcatcgtacttcacgttcatgtcctcctaaaatcatgttgtggtttatatcgatcaatctatgatttcggatttcatcttccacggacacctacgttaaattttccgaagaaaacaaataatccgaacccgtctcctatcggaaacaagttcggattatttttgtttggtccgagtggcgagaatcgaactcacggcctcttgaaccccattcaagcgcgctaccaaaactgcgctacacccggatatctgtttgcgtttgccgctcacagcttgattagtatacccgacttttcccgttttgtcaagcgctttttccaaatttctgatgcagtttttacattttactgtcccggcttttgcccgccaaaaggatgcgcgaaagagcgttattttcaaaaatcgcgatacacatcttcctcatcgtcctcatggatgggggtggtgtcgtccggcggtgcgccaaactccaccgtggcaaaggccagcgcgaatacgctgtctgccccggcgtgaagcagtgcctgcgcgcaggcggcagctgttgtgccggtggtgatgacgtcatccaccaacaggatgcgcttgccctccagctgctgcggctgtgccgcccggaaagcacctgccacgttggctatgcgctgttccagcggcagaccggcctgatgccgtttggcgcgggtgcgctccagtgcctgcggtgccaacggcacctccatagccttggccagcggcagcgccatcagttccggcacattgtagccgcgccttttaccggaggccggcaccggtacgatcaggtcgtacccgatggccgcccacggcaccggctgcgggagcagctcgccgtactgcacggtcagttcaccgccaaaggccagctgtaccagacggttgcccatctccacagcccgccacggcttgccctgatactttgcgttcaggatgccgcgccgcacacagccgctgtaacggtagggcgcagccgcaccggccagattgctgatatagtgctgcgccgggtccagccggatgcccggcttgcgacgcagcgtttccagctgcactgcacagtccgggcaatctcgtacatcccccagcacccggccgcagaaagggcactcgcgcgggtagagcagctgccgtaccgcccgcagcgccctgcgccgggggtcatagtagtccatcagtcctttttgaccgccacgatcacccgcacgcgcttgcctgctgcgcagccaaagttatcgtaccagccagtcaggtagtagccctcagagttcacctcagagagcttggtggcgtaatactgtcccttgtaccacaggtacacctgcatatcgtcagccgtctcgtagcgggtgccgttgcttatcaccgaggctgcacccacctgatcgatcttcatgggcatcagctggatcatggcctttaccgtgccgttcacgttttgccgcactgccagaccgcccgccagcaccggatacttgatggaggtggaaaagctggcctgactgccgttgacgtagcagatgtaggtagcgccgccgcccacaaaattgaggatggtgctcataggctggccggtaatgttggccagctgcttgagaccgatgctcagcagcgagccggaactgctggtgatgcggttccagaccgtgctcagcaacgagccgtcaatgacgccccacaggatctcgctggtggtgggcaccagcacactgcgcagatcgtccaccacggtggtggtgttggtggtgccgccggtagagccggaaccggaagagccgtccccggtggaaccgctgccggagccggaagaactgtccccggaagagctatcccccgagccggaggagccgctgccggtcagggtgcccagaatggaactggcgttgaaggccagattcttcacatcgtccagcacgccgtatttccacagatcaccggtgacatcgttcaggatcaggcggtcgatctgtccctgctcattcagcgtatagtaacgcacggccagtgcgttcagctttgtccccgctattcggctgggacgaaccgtcccagccaacccctccgatgtcgtatccagaatttgtacgtcatcggccagagcatagtcccccagcgcggtggcggtgtcgttgatggtgccgctgaccgatttggactcgatggcggtcacctgttccccttcgggggtcacgctgatctccaccagccagccggtggggtagttcaggcttttgtcgatattcacagtgcgggtaatgccgtcggtgcacatcaccgagatcttttgcagcacgtctgcgccgttatcctctacaaggctgcgggtagcggtctgcaccacgccatagaacacgctgtcggcttcctcgccggtgatcacatcggctacctcgttgtccatgcccagcagcagggtgaccacttcgcccacgccgccgccgttcagggaggagatcttggacgccacggcagagctgcccagcgtgtaattgctgcccgccacggtcagcgcggtaggcgcgctggcgctgggcgatactgccgtgatgcggcctgcggcgcggcgggtgtagatccacaccgtctgcaggctctcgctgtaatagtacacgtcgtacttgttcagctctgccgaagcagaggccttatcgttgcggtagacgctcaccggcgtaaagggcagctgggtgccctcttctgctacaaagggacccttgcggctcttgagcagcaccgaagaggtatccacctgaccgttggacaccgtaaagcccagcgagctgccgtaagcgctgccgctggcggtgttggcgcgcagggcgttgtacagcagcagggtgctctgctcgtaggtcatggcctgtccctgcgtgcaggtcagctgatcccgcagaccgatctgctgcgccttgttcagctgtgcctgcgggaaggagccggtcatgtcggtggtcttatagctcagcagcttcagcaccgccgcacaggcttcctccagcgtgacggtgttgtccgggcggaaggagccgtcggtgtaaccgttcatccagccctgctgcaccgcaatgcggatgtagggtgcccactgggagctgccgggcacatcccggtacaaagtgcccaccgtgccctgtgcgcctacgctctcccggtaggtggaaaaggacaccagcattttggcaaaagcgccgcgggtaatgttggcgctaagctcctgaccggtgggcacagcgcccagagtaatagccgtctgcagggccgtgttgttgatgctggccgccgagaccggcagcaccagcaccgacaccgcaatgctgaccgccagcagaaatgcgagaatccgttttttcattggtcgtacctcttgttctttgtttatcacgccgccgcgatcaatcgtagcgcaatgcttcaatggggttcagccgggctgcgcgccgcgccggcagatagccgaacagcacgccgatgcccaccgagatgccaaaggccaccacaatggagttgaaggaggggcttaccgtaacagtggtatcggtcatgaacatgggcagcaccttgtttgccgccatggacaccgcatagcccagcgcaatgcctaaaacgccgcccagcgccgaggtagtggctgcttccaccacaaactgcgccagaatggtgcgctcctttgcgcccagcgccttgcggatgccgatctcgcgggtgcgctcggtcacagacaccagcatgatgttcataatgccgatgccgcccaccagcagcgagatgctggcaatgccggtaagtatcacgatgaccatgttgatcatcttgttcatttcctccagccactcgctggcgctgtacacatagtagccgttttcggtcttgaggatcgacatcaattcctcttccatcgtgctcttggcctcgttggcaaggctttcgtcggccatcatggcggtgtagcagtccaccatgctttggctggaaagccgcatcacggtggtgtagggcaggtaaacgcaatcgtcatcgctgccctgctgcatagtggggtcgctgactttggcagacagcacacctacgacgcggaacttgttggcaccgatcttgagcgtctgccccacaccgttgccgccaaaggctacgcggttgaggtaatcgccgatgacgcagacctgcttgttgtcctgcatatccatgtattgcaggccgcgcccctgaacgatctggtaattcttcatttcggtaaagttttcgtccacaccgctcatgttggaccagcggtagctggtggtaccgatcttcagcgtaccgctggctttgccgctgaagttgacctgcggcgacaccgccttgatcaggtcggaatgccgctggcagatatcatacatctcctccaccgacacggagcgggagccgtagccccacacctgaatgctgagggtgttggtgcccagtgcggaaaagctgtcccgcatgctcttggtcatgccgttgcccagacccacgatgacgatgaccgccatcacgccgatgatgatgcccagcatggtcagaaaggtgcgcagcttgttgctccacacgttctggatggcctgccggaaggtttcaaagatcatgcctgttcctccttttccggcgtttcgggcagcagggtgggctgcaccatggcctccggtgcgtgggagtcgccgtcatacaccacctgaccgtcctccagccggatgatgcggtcggcctgcacggcaatggaattgtcgtgggtgatcagcactacggtgtgtccctgcttgtgcagctgctgcaaaagccccagcacctcgcggccggtatgggagtccagcgcgccggtgggctcgtccgccagaatgaccggcgggttgcgcaccagtgcccgcgcaatggacacgcgctgctgctggccgccggaaagctggttggggcggtttttcagcttgtcgccaagccccacctgctccagcacctcccgggcgcggatgtggcgctcggcgcgggagatgcccgcatacaccagcggcacctccacgttttccatcaggttcagcctgggcagcaaattgtattgctggaagataaagcccagcatctcgttgcggacagcggccagctcgttgcggttcatcttgcccacatcccggccattgagccggtaggtgccgtaggtaggcacatccagacagccgatgatgttcatgcaggtggatttgcccgaaccggactgacccacgatggccacgaactcgcctttttcgattttcatggtgatgtggtcggcagcctttaccgtggtatcgcccatctggtaatatttgcagacttcatcaaactcgatcagagcgctcattcatccctcctgcgtcaatccaccacgactgcgccggcctcggcggggtcgatgccctctgcgggctcttcagcgtccgctgcgggggcttcaccgttttccgtctcctccggcagcgtctcctcgccgccctcggcaaggtctgcattgtttccggcgccgccgatcacttcgccgtccatatcgtcatagccgccgtcgtcatagtagctgtcgctgctcacggagctggggtcgtaggcgatggtatcactctcggacaggccgctggtcacctgcgtatagttgtcgtcgctgacaccggtcttgaccttgacatacacatagccctccggtgcgctcatggaatcatcggcgttcacggcgctgggagaatcctgccgcaccagcacataaccgccccgcacaatggcggcattgggcacggtgagcgcatttttcgcctgcgccaccacgatctcggcgttggcattcatgcccgggcgcagaccatcggtctcgtcaatgcgcacggtcaccgggtaggtggtggtaccgccgctggtatcacccttcatggacacacgggtgaccaagccctcgtaggtcttatccttcacggcatctgcggtcacctgtacggactgccccaccttcaggctgctgacctgcagctcgtccacgttgatggtcatttccagataactcaggtcgtagatggtgcacaggtcgctgccggtgctcagggcatcgcccaccttggcatttttctcgatgatggtgccgctgatgggcgaggtgatggtgtagttatccatggcgtcctgcatattttgcatggacagttccgcgccgcgcagggtctcggaggcagactggatggactctgtcagttcctcaccgctgagggtcaggatgatatcgtccttgttcacgctgccgccctcccgcacattgatggcggtgacggtaccggaagccagcgcagtcagggtacgctcggcctgatactggaagttggctgctgcaatggagctcaccccgttgatagtagccgttgcagcctgtgccgtggtcagaccacccgcattggacaccgagagggtcacagtgcgggtgagcaggttgcccgtgctcagggcatcggtgccggtcacagcggtaatagtgccgggcagcacctcaaaagtaccgtccagcgtcacctgggcggtctgccccgccgagaagttagcagcatccgcagccgggaactccagcaccagattcatcttggagctgtcccgcaccacggccacctcctgaccgctctttacctcatcgcccttgttcaccttcaggctgctgacgacgcccgccacctcggcacgcacatactgatggtcggcggtcttgtcgtagctgcgctgcgcctgctgcagggtgatggctgcctgctccaccttggtggttgcatcggaggaatccaccgtgtagagcacagtgccctcctccacgatatcgccctcctcaaagccgccggtcagcaccttgccgggcaccagcgatttgacgctgtaagtattggcaggcttcagcgtaccagtgccgctgagcgtgttggagacatcccgggtctccggcactgcttctgtataggaagtatccacgttggcgggctttgcacccttgggcttcagcagccaccagccgcctgccagcaccacgatggccaccggcaccagccacttccagttcttttgggcaaaggctgctgcaccgccttttttgggtgcagccgctgcgtcctgctgcgggtcggcgggctgtttagacttgttccagatcattcttgccgttcctcctaggttcttttatgacaaggtgctttttgcaaaagcacccgtcagaaactcttatttgtagtgtatcgcattttgccccgataaacaagcgtccaattttcgtttcacggcatttccacaaagtttcagacttttttaacaaagaatggctttctttgtgcgccgctgagcagttgcttatctttatataatacgattcaaactgcctctcctctgctctccttcctgtgaaaaagggttctgaaaagcccgcaggcttttcagaatctcagatgggggagattctctgcaactatcggctcacgccaaaaagctcccccttcgggggagttggcatcgcacagcgatgcctgagagggttcttttgccgtttttccctcaaaaagaaaatcagccggacccgaaggcccggctgatttattcttttttaccctgcgtctgtgatgggctctaccaccacatacacccctgcgggcacacaggcggcccatgcgccgtccttgtccagccagccgaattgctcacagacatggtccgggcactgactgtccaaaaacgcgatggcaccatccttcacctgcagatgcacgatgtagtcccctacctcgtacaggtaatcatgatcctgcgcaaggggcaaagtctcggtaacgccgtcaccgaaatccacaacggcctgtaagccgctgcccttggctgggtgctgcgcccgcaccgcaagaaaaatacctgcggccagcaccagcaccaccagcgcaaagatcacatttttcttccacgcactgcccttgggggcggcggtgtcagagtttttttgctttatgctcatgcagcgtacttgctggcagctgcaccggcaatgcggccaaagacggtaaagtcggccacagcgttgccgcccagacggtttgcaccgtgcacaccgccggtcacctcacctgctgcgaacaggccggggatcacagagccgtcagccttcagcacctcggtgttggtgttgatcttcaggccgcccatggtgtggtgcacacctgcggtaaccttgatggcgtagtagggagcgttatccagagcctttgcaaagctggtgcggccaaagtcggggtcgttcttggcggcaacgtagccgttccaggtcttcatggtctcggcaaaagcagcttcgtccacgcccatggcctttgccagttcctcgtaggtctggccggtcacggtgtagccctttttgatgtagccctgaatgacgctggaagcatcgaccatagcctgatccaccaccagccagctgtagctgccggtctgagcgatctcggcagcggaaaccacgtcacgggtgcccacttcatcgatgaagcgcttgccctcggcgttgatcagcacagcgccgtcgccgcgcagaccctcggtgatcagagcagcggtgttagcctccacggtggggtggatctggatctgatccatgtccacagtgtcagcgcccacagcggtagccatctcaatgccctgaccctgtgcgcctgcggcgttggtggtcataaagcccttcagctcgggcttgtactcggtgaccatgtccagatttgcgccgaagccgccggtggtcagcaccacagccttggcattcacggtgatggtctcgccggtggaaccggtagccttcacgcccacaacagcgccgtttgcatcggtcagcagctcggtagcagtggtgttcagcagggtctgcacgccggccttgtcgcagttctcctgcagcagggggatcatgtaagagcccacagaaagggtcttgccctcagcatccacggggcgatggatacgcttgacggatgcgccgccgaagctggaaacgctgtgcagggtgatgccgtgctcgtccagccagtcgatggcgtcagcgctgttggagcacagagtctccaccagagcggggtcgttgatgcccttgccgccgatcatggtgtccagctccatcagctccacagagtcgaagtagcccttggggtctgcctgataagctgcccactgctcagagacggtctttgccagagcggtgatggtagcgttgtcggcatacttttcagcagcggtcttcagggtcttttccacgcctgcggactcgccgaactcgttctcatcctgatacacggtcttgccggcgttcatgccgccggtagcgcgcacggagttgccgcccaccatgggctggctctccagaatgaccacgctcttgccctcggcagcagccgtgatggcagcagtcatacctgcaccgcctgcacccacgatggcaatgtctgcatcaatggtggagtcctcggccttgttctcctcagccttgacctcggtcttgtagtcgtcagcgttcaggccggctgcgaccagagcggcagcagcagcttccttgatggcgtcagaggtgatggttgcggtggccacaccgtccacggcaatgctgccgctctcggcaatcgcgccgggcagctgctccagagccatggtgccgataccgggggtctcgtccttgccctcggcagtacagccggtgatcttgccgtcggtcaaagtcagcgtgacggtaacatcgccgcccatacccttggctgtaccggtgaactcgccggacacgcctgcggtggaggaggcagacttgctgccgcagccgtagcccagcaggctgacgcttacaacagccgccatggccagcgcagccacgctcttgcggatctgattctttttcattgtttcatccttcttgttttgggttgcttgtgttcggatatctatcagcaaaaaaggggaagctgctcattcggaaagcagctccccctcgctgaaacttaggaaagacttaggcgttggcctgagctgcagcaacagcgcaggcaacggtagcgccgaccatggggttgttgcccatgccgatcagacccatcatctcaacgtgtgcgggcacagaagaggagcctgcgaactgagcatcgccgtgtacacggcccagagagtcggtcaggccgtagcttgcggggcctgcagccacgttatcggggtgcagggtacggccggtgccgccgccggaagcaacggagaagtacttcttgccgttctcgatagcccacttcttgtaggtgccggcaaccagatgctggaagcggacggggttggtggagttaccggtgatggagcactgcacgtcctccttcttcatgatggcaacgccttccataacgtcgttagcgccgtagcacttaacggctgcacgctcaccctcggagaaggggatctccttgaccacagtcagggtctgggtggggatatcgtactcggtctgcacataggtgaagccgttgatacgagaaatgatgtaagctgcgtccttgcccaagccgttcaggatgacgcgcaggggggtcttgcggaccttgtttgcggtgcgtgcgatgccgatagcaccctcagcagcagcaaaggactcgtggcctgccaggaaagcgaagcaggtggtgtcctcgctcagcagacgagcgcccaggttgccgtgacccagaccgacctgacgctgctcagcaacagagccggggatggtgaaagcttccagaccctcaccgatagcagctgcgcactcggcagcgtcggtcaggccgcgcttcacagcgatagcggtgcccagagtgtaagcccagacagcgttatcaaagcagatgggctgcacgccgcggacgatcttgtcgcagtcgatgcccttggcgaggagcatctcgttgcaagcgtccagagactccagaccgttagccttcaggcatgcctcgattttaggcatacggcgatccatagattcaaaagttgccattgagttgttcctcctctcttattcctcacgcgggtcgatgtacttcacagcgccctgctccttgctgaagcggccgtaagtacccacgttcttctcgtaagcctcgttgggggtcttgccgtgacggatatcctccatcatcttgcccagcttgacgaactgatagccgatgacctcatcgttagcgtccactgccagcttgttgatgtagccctcggtcagctccagatagcgcacgcccttctccttggtggagaagatggtgccggtcatggagcgcagacccttgcccaggtcgtccagacctgcgccgatgggcagaccgtcctcagagaaagcggtctggctgcggccgtagacgatctgcaggaacagctcgcgcatagccacgttgatggcgtcgcacaccaggtcggtgttcagagcttccagaatggtcttgccgggcaggatctcgcctgccatagcagcagagtgggtcatgccggagcagccgatggtctccaccagagcctcttcgatgacgccgttcttgatgttcagggacagcttgcaggtaccctgctggggtgcacaccagcccacaccatgggtgtagccactgatgtccttgatctcataggccttgacccatgcgccctcttcggggatgggagccggaccatgcttaggacctttggtgatcgggcacatattctgtacttgctgcgaataggtcataatcatactctccttttgacaaatgtcgctttggcagcacaaaaccgccgccgcgccctgccggcacagctgctgttccatactgcttgcatccgaaccgggtgcgctgctctctttcagcgcctgcaccggtactaccacgcatgattttattatagagaaaacggacgaattttgcaagtcatttcctgcaaaaagtacagccgggttttacggtcatccggcgctaactggcatttccaccgctttacacaaatcagtcgtcaagtttttgtcaattctgccgtaagcaccggcaaactttttgcacccttttctttttgcgcgtttcagcgcgggtctttctgcaccggatgcagcgcccaaatggctgcaaaacccgccgccgcaccggccatggcaagcaggtgccgcccattttccagcgccagcaggttggctgcaaaaggaaacgcaaggctgcccacgctctgccccaaggccagaaagccgtagttcacccccgcgtggggcaggccgaacaggtcggtggaaagggcgggcagcaccgcagccagcgccgagtagcagaaggtgagcccggcgtagcacaccaccacccaccagccccgcgccgcccagaacgccgtcgacagcccaagcgaagccgcaaacagcccaaggtcggtggcgcggcggccaatgtggtcgctgagcatgggcatcagcatccgccctgcggcgctgcccacgctgcccagtacaatgctccacagcgcagcggtctcgtccagcccgcgttccatgcccagctttaagatgatgggactgaacagcagcaccgccggagtggaaaagcacaccgcgcccgcacacaaccagtactgctttgtgcgcagcatctgccccggggagaggtcgatgccgtttttgccgcttggctgctgttttttctgcggcgggtcgctgagtaccgcactgcccgcaaggcaaaccggcaaagtgagcgcgccaagcgcccagaacgcgccccggatcccctgcaccgggccaaagccctgcaacgccgcccggacgaatagggtaaggaacgcgccggaaagtcccaccgccccgccgatgaccccggtcgccagtcccttgcgccccgcgtaccacttttgggcgcaggactggatagaggggtataaaaaggccgtgcccagccccgccgggatgctgaaggccagaaagaacccccaccctgccctgcccggcagaaaggccgctgcaaaaaagccgccgcagagcagggctgtgccccacaacgccgcgcagcgcgggccctttttatcctgtaaaaagccgcccagcacacaccccaccccaaaggcggcgatgagcaacgcaaaggcgtagcctgccccctgctccgaaaggccgtattcctccatgaccggctgctgaaaaacgccccaagccgccggtaagccggtaagcacctgaatggctgcccccgcagccagaattgtccacgggtgttttgctgcaaactgctgtttcataccttcacctcaaagatttgtgcaatttgcgatagtgtgcccatttggattgacaatccggcattatcctttataatggtaaagtactgagttaaaaaacgctcccgccccttttcaggcatcgagggcgggtacaatttacagatagagaggaattactattatgaaaacacaggctttgaagggtatgcgggacctgctgcccgccgaacagaccctgcgcgattacattcagggcaagattctggagacctaccgctctgccggttttgagcggatctccacccccatgctggaggatatggaaaatctggacaaatccgagggcggcgacaacctgaacctgatcttcaaggtgctcaagcgcggtgataagctgaccgctgccctgaacaccggcgaccccaagcagctgtccgacatgggtctgcgctacgacctcaccctgccgctgagccgctactacgccgccaacaaggacaagctgcccaaccccttcaaggtgatccagaccgaccgggtgttccgcgctgagcgcccgcagaagggccgtctgcgggagttcgtgcagtgcgatatcgacattctgggcgacgcttcccccaacgccgaggtggagctgatcgacgtgaccacccgcgctttgctgaacatcggctttaccggctttaccgtcaacatcaacgaccgccgcatcctgcgcgggatgctggagagcatgggctttgctgccgacacgctggattccgtctgcatcacctttgacaagatggacaagatcggtgccgagggcgtgaaggctgagctgaccgagaagcagctgccggaaagcgccatccaagcactggccgacttcatcgccgccggggacgtgacgctggacgccgtagccgcccgctgcgccgaccccgccattgccgatgacttgaagtatgttctggctaccgccaacacgctggctgccggccgctatcaggtggcctactgccccagtctggtgcgcggtcagggctactacaccggcatggtgttcgaggtgacctgcccgcagttcagcggtgctgtggccggcggcggccgctacgacaacatggtgggcaagttccttggcgtacaggtgcccgccgtgggcttctccatcggctttgagcgggtgtgcggcattctgctggagcagggctaccagatccccggtgcaaagcagaagatcgccctgctgtacggcaaggacaccgacttccctgccgtgctgagcaaggccgctgcgctgcgcgagcagtacaacgtcaccgtgctgccgcagggcaaaaagctgggcaagcagctgggtcagctggaagccgcaggcttcgcgggtgccgcctttatggacaaggacgaggtaaagatctttgcccagcagtaacccgcccgcctgacgattttagagttttgtgggtcagaaacgtctgcggacgtttctgacccacttttttcagccgtcacgacactaaaaaagcagccctgccggtgctccggcggggctgcttttgcgtaacagtgtattttttagaactcgatcttgctctcgatgtagctcttcagctcgctgatgggcatacgcacctgctccatggtgtcgcggtcacggacggtgacgcagttgtcggcagcaatgcccttggcctcgtcgcccacagtgtcaaagtccacagtgatgcagaacggggtgccgatctcgtcctcacggcggtaacgcttgccgatggaaccggtatcgtcgtagtccaccatgaagtacttgctcagctcgttgcggatctccatagccttctcgcccagcttcttgctcaggggcagcacagcgcacttgtagggagccagagccggatgcagatgcagcacggtgcggatatcctccttgcccttgctgtcggtcaggtgctcctcgtcgtaggcctcgcacaggaaggccagcgccacacggtcgcagcccagagagggctcgatgacgtaggggatgtagtgctcattggtctcgctgtcgaagtactccaagctcttgccggaagcctcctgatggcgggtcaggtcgtagttggtacggtctgcaatgccccacagctcgccccagtcggtgaacgggaaggcatactcgatatcggtggtagcgcggctgtagaaggccagttctgcgggctcgtggtcacgcagacgcaggtgctccttcttgatgccaaggctcagcagccagttctcgcagtagtccttccagtaggcgaaccagtccagatcggtgccgggcttgcagaagaactcgcactccatctgctcaaactcgcgggtgcggaaggtgaagttgcccggggtgatctcgttgcggaaagccttgcccacctggcacacaccgaagggcagcttgcggcgggtggtgcgctggatgttggcaaagttgacaaagatgccctgtgcagtctcgggacgcagatagcaggtggaggagctatcctcagtcacgccgatggcagtcttgaacatcaggttgaacttgcggatgggggtaaaatcgtgcttgccgcacacggggcagacgatatcctcgtgctctgcgatgaaagcgtccatctcgtcaaagctcatggcgtccacattcacctcggggtgctcctcaccgatcagcttgtcggcgcggtggcgtgccttgcaggcgcggcagtccagcagggggtccgagaagctggacacatggccggtagtcacccaggtctgcgggttcatgatgatggcagcatccaaacccacgttataggggctttcctgcacaaactttttcagccatgcctttttgacgttgttcttgaactccacgccaagggggccgtagtcccagctgttggccagaccgccgtagatctcggaaccggggaacacataaccacggttcttgcaaagattgacgatcatgtcaagggtcttttcgctctgttccattgtagtacatcctttccgtccgcggctggtttgccgtgtcgtatcgtgttgtgtgccgacggctttcccaccgccgggcgtgcttgcggcttgcacaagcacagtatatttactgtaccatgttttgccccgcttgtaaagcccggcaaagagttcagctgcgctctgtcaggtattttaccagcaggcggtacagggtatccgggtcgatgggctttgacagatgctcgttcataccggcctgcagcgctttcaggcggtcctccgcaaaggcgtttgccgtcatggcaaagatggggatgctctttgcgtccgggcggtccatggcgcggatggcgcgggtggcctcgtggccgtcccgcaccggcatcatcacgtccatcaggatggcgtcaaagccgcccaccggcgaggctgcaaaggcctccaccgcctgctgtccgtcggcggcttttgtcacctttatgcccacatcgttcagcaaaaactctatgatctccatgttcagggcgttgtcctcggccagcagcacctgccgcccacgcagcacagtaaggtctgtctgctgccgctccggctcttcggttgcagtattgtcgatagcaaagggcagggtgatggtgtaggtggtgcctacgccctgcttgctttccaccccgatggtaccgcccatcttatccacaaggcttttggtgatggacatgccaaggccggtgccgccgtataccgagcgcgccccggcgttttcctgcgtaaagggctcgaacatccgctgctggaactcctcgctcatgccgatgccggtatccgcgcagacaaagcagatctgcaccttgtccccggtacagctcagttcaaagcagtccagcatcacgcgccccttctcccggttatacttgatggcattgctgagcacattcatcagcagccgcttgacgtgcagcgggctgcccaccagccggggatgcggcagcctgccgtattcccggtgcagcacaataccgcgctcttccgcctgtttttccagcacatccgtgatctcgtgtatcagctcgggcagatcaaagggcacattttccagcaccacctcgccggactccagcttgcccatatccagcacctcgttcaccagttccagcagcagggtggaggcctcccagatctttttgcggcaatcggcctgccgcgccatatcctccgggcagcggtcgccgatctccaccataccccggatgccgttgatgggggtgcggatatcgtggctcatgcgctgcaaaaactcggtcttggcaaggtttgcgctctctgccttcagcgcagccgccttgagggtcttctggtactcctgctcccggcgcagctgctgctcccggtagcgccgggcagtcttgccgcgcagcaattgcaaaaggaacagcacgaccatgtaagcaaaggccgccatgctcacattgcgcatggtagaggcatacacctcctgctccgggcggtaaacatagatataaaagctgcgtccctgccccacaataccgtaggcgtactgctgcccggtggtgctgtgcacatggatcatgccgccgtctgtgctgcgcgcttttaaggcagaaagggtggggttttcgtccacagtggtatccagcaaagaggtatcgttgctggccacgatgcggtcgccccgggtcaccacgataatgccgtccacagcggggttatagccctgtacgcagttctgataggacagactgtaattgcgcacatattctgccgtggtgcggtagtacaccacgagcaccccgtccccatctttccgggcacaggctgcggtgtccacataggagctgtcctccttttccgtccgcccggcatagacctgctgggggtggtcggccaccttcagcacgatagaaccggccagttccttttccatctgttcccggacctgcgggtcagccacccggccatcctgtgaggcaccgcacaaaattttgccctctgccgaaagcacaaggatgccgctgagggtataatcctgcaaatattcttccatagcggcatcgtccagcacccgcccggggttctcctgctggtcccgggcgatctcgctgcacagatgctgcgcgttttccatcacccgcatcaggcttttggcctcggtggcaaggttcaggttatcgtagctggtgcactgctccttaacatagctgatggtatcctcaaactgcttttctgcattttgcaggtcgctgtgggccgaaagccccagcacaccgcccagtatcagcaacccagcaagcgcacagatcagaatgtgctgcttccggctgataaccagtgaccctttttccattccgtcatgcatgggcgctgtcctccagtccatccagatagtgcccggggtcgtccagatagcggctcacgatctgccggacggtgccatctgccagcatctcccgaaaaacctccgtcagctgctgcggcaggtcatcgccgcgctctttggcaaaggcaacgcccagccgcgccgtcatcagcggctcgtccagaatgcggtattcaacgctgtaatccttcatgaactgccggatggcgctttcgtgggcggctaaggcgtccgcgtagcctttgagcagggtggtgtagagcagatcccgattctgcagggaatacagcctgcgcagccggggcagaccgttctgctccgcattcaaaaacagttcctccggctttgtggtggactgcaccgccaccaccttaccggccagatcctgcagagtgcgaatgtcgctatcggagcgcaccgccaccacctgacggctgtacagataaggccctgcccattggtattcttcctcgcggccatccatggaaaagctgccccagatgcagtcgatggtgtcgttttccaccagttccttcttcttttcccagtcgatggtcacaaatttcacccggtagcccagccgcccgaacgcctcagtggccagttccacgtcaatgccggtgggtgcgccgtctgtgcccatatagttgaagggcgggtagttatcgctgcccaccacgatgaccggcatcgctgccgtatagctgtcggcttttccgggatgcaggcagctgcaaagcagcaccgcacacgttgccagtgccagcaggcaggccgccagccgcagtcctcttctgtattttttcatggttcttccatcctgtattttttgctgtattttacagcagatcgctccatgttatcagtataataaaatctgttccaaaagaaaagccaaaaatcacttttccggcagtttttacgcttttctgtaaaaagagctcccggagcgttcgcagacgttccgggagccaaaataaaactttttacttgtggtacttcatgcccgcattgatagtgcaggcgcggtagatctgctcggtgagcaccagccgtgccagctgatggggcatggtgatgcgccccatgctgaacttgagggcagcggcctttttcacctcatcggacaggccgtgggacgagccgatgacaaaggccacatcccctgccccgctgccggcgcgctgtgccagaaactgcgccagttcatcggaagagatctgcttgccctcgatgcacatagccacgatagcagcacccttgcgcacactggaaaggatggcttttccctctttatccagcgcctttttcaccacagcgtccgaggcgtttttctcctcgatcttttcctccggcagctcaaggatgcggaaagcggcaaaagccgccagacgcttctggtactctgccacgccctcggcaaaatatttggcgttcagcttgcccacacagatcaggtcgatattttgcatgactgcttcctcttttcaggataaacgatttaaaattgtctccgcttcgctctgacaataacagcggaaaattttttataatttgtaactccgaaacgactgcggtcgtttcggagttactttttcacgggaggggacttttcggaaaggcggcggggagtttcctgagcaaattccggcgaagtggggccccggtgcgcagcactggggcggaacagggggttccggactcatttgcgaaggaaagttctccgccgcctgccatcacagcaggctcatctgctcgccctcgtcctcggcgcggatcagcgcaccggtggcgggcaggctgcgcacgcgatagcggtgtgggttggccagctctaaagtgtcggccggtaccaccgaggcgatggtctggttctttttcagggtgaccaccgccacaccctgactgtcgcgggtggtcttggcggcgatctgcgccgtacccaccagcagcatccggctggcactggtgcggatggcaagctcggtctcctccggctggtaaagcatcatggcaagcggttccttatcgctgtacgccttcagcagtttgcgacggttctgcttggtggcgtaggagctgagggggatctttgcgcacttgccgctggcaaagaagaacagcataaagccgctgtaatcgccggtaatgaccatgctcaacacgttttcgccctcgtccatgcccagccgtcccgggataaagatgcccatctgggccaccttgccgtcctccagctctgccagacgcaccttgtacacctgctgcttgtcggtaaagaacagcgcctccacgttgttgcgggtctccagctgctggatgatctcgtccccctccttcagcttgtgcgcaccggcggtgcgcaggctctggggcgggatctttttaaagtagccctcccgggtaaagaacacggtcaccgggtagtccggcacagcttcttcctcggcggcggcgtcctcctcgggcagatcgtacaggatctcgctgcagcggggcttgccgtattttttcgctacatcgttcagttcgttgatgatgatgcggcggatgcgggcgggctttgccagcacatcgttcaggtcggcaatgtccttttccagctgctcgatctcgccggtgcgcttgaggatgtattcccggttcaggtgtcgcagcttgatctctgccacatagtcggcctgcacctcgtcaatgccaaagccgatcatcaggttgggcaccacctcggtctcctcctcagtagtgcggatgatacggatcgccttgtcgatatccagcaggatggcggcaagaccctgcaacaggtgcagccgcttttccttgccgtgcaggtcgtagtaggtgcggcggcgcacacactcaatgcggaatgccgtccactcctttaaaatctcccgcacacccatgacccggggctgaccggacaccagaatgttgaagttgcagctgaagctgtcctccagcggggtggccttgaacagttttgccatcagcttgtcggcatccacgccgcgcttgaggtccagcgtcagcttcagaccgttcaggtcggtctcgtcacgcatatcgctgatctccttgaccttgccggtcttgaccagttccgcgatcttgtccatgatggcctccaccgtggtggtgggcgggatctgggtgacctcgatcatattttcgccgggcactgcattgtagcgggcgcgcacctttacgctgccgcggccgttctcgtaaatttcacgcatctgcgcttcatcatacacgatctggccgccgcccacaaagtccggggcgggcatggtggtgccgatatcgtggtgctcgtccttcatcagcgccacggtggtggcacacagctccgccagattgaaggagcagatgttgcaggccatgcccaccgcaatgcccagcgtgttgttggccagaatggtggggaaggtgaccggcaacagggtgggctcggtggtggtgctgtcgtagttgggcacaaagtccacagtctccttgtcgatatcccggaacagctcctcgcacacgctttccagctttgcctcggtgtaacgggcagcggcgcaggacatatcgcggctgtacgccttgccaaagttgcccttgctgtccacaaagggcaccagcaggctttcgttgccgcggcccatgcgcaccatggtgtcgtagatggcggcgtcgccgtggggattcaggtgcatggtgctgcccacgatgttggcagatttggtgcgtgcgcccttgagcagacccatctcgtacatggtgtacagcagcttgcggtgcgccggcttgaagccgtcgatctccggcagcgcgcggctgacgatgacgctcatggcgtagggcatatagttggtttccagcgtacgggtaatgggatcctccagcacgctgcctgcgtttaaaatttcaacgccgtcacccagctgcgggcgcaccggctttaaggttttcttggtcgatttttttgccattgtgtttcctcatactgtccagaggccgtgtttcgggcttttggggtgcattgctgccgcccgcgccctcatccggctcgtaaactcgccaccttcccccggccgggggaaggctttggcacggtatcgttctgtttatcaggacacgtccagatcatccagatactctgcgccgtgctgagcaatatgctccttgcggcctgccagattgtcgcccagcaggatatcgaacacctgcgcggtctgcaccacatcggtgggcattaccttgatcaggcggcggctttccgggttcatggtggtcagccacatcatctcggggtcgttctcgcccaagcctttggagcgctggatggtatattttttgtccccgatcttttgcagaaaagcggccttttccgactcggtataagcaaaataagtgcggtctttcgtggtgatctcgtacaaaggcgactctgcgatatacacatagcccttgttgatcagggtgggggtaaggcggtaaagcatggtcagcacaagggtgcggatctggtagccgtccacgtcggcatcggtacagatgacgatcttattgaaccgcagattgtcgaggttaaaggtagccaattccttattatgctttccgcccagctccacaccgcagcccatcacctttatcaggtccacaatgacgtccgacttgaagatgcgggcatagtctgccttcagacagttcaggatcttgccgcggatgggcatgatggcctgatattcactgtcccggctggacttgaccgcgcccatagccgagtcgccctccacgatatacagctcgcggcgggcggaatcccgggtgcggcagtccacaaacttctgcacgcggttggctaagtcgatttgcgtagagagcgtctttttgatgctctggcgcgttttttccgcgtgctcgcggctctgcttgttcaccagcacctgctggcagatcttctgggcctcctccggcttttccagaaaatacacttccagataatgcttgaggaagtcggtcatagcctgcgagacaaatttattggtgatggcctttttggtctggttttcgtagctggtacgggtggaaaagctggaggacacatacaccagacagtcctgcacgtcctgaaagctgatggtgctctcgccctttttgtacaggttcttttccttcaggtacttgttgatctggtagacaaaggcggtgcgcactgcgtgctccgggctgccgccgtgctccagccacgaagagttgtggtagtattccagcagctgtaccttattagagaaacaaaaagccgcactcatgcgcaccttgtagtccggctggtcctcgcggtcccggcccacggcctcgctctcgcagctgaacaccggggtcagggtgtcctccccagccacctctgccacataatccgcgatgccgttctggtagcaccagctttcgtgccacggcttgccggtggcggggtctttttccttttcatcggtaaagttgagggtaagccccgcgttgaccacggcctgacggcgcagcacatccttatagtagctgccgggcacatcgatatcggtaaacacctcatcgtccggcttccagtggataatactgccggtgcggcggcccttgtagggctccttttgcaggccgcccacgttctcgccctttttaaagtccagatggtagtgatagccgtcacggtagatatcagcggtcatccatgccgaggcgtactgggtggcgcacagacccagaccgttcaggccaaggctgaactcgtagttatcctcgccttcgccgtacttgccgcccgcgtacatctcgcagaacagcagctcccagttgaagcgcccctcgccgttgttccagtccacgggcataccgcggccaaagtcctccacaatgacgctgccgtccttgcagcgggtcacgttgatggtatcgccgtggccgtcgcgggcttcatcgatagagttggacacgatctcaaagatcgagtgggcacagccctccacaccgtctgagccaaagatgactgccgggcgcttgcgcacacggtcggcaccctttaacgaggtaatgctctcgttgccatattcctgtttttttgccatgctgctcctcccgtcccgccgcagctgtgccacgcaggacgtcctgtaatcaaagcagacgcccgccctttctattatataagaaatataacagcatctctgcgggcataagcgcctgtgttcttttcttttattaaaccataggttgtaaaacttgtcaaatattctttctctcttttcccgtactgcccccggcacgaaaaccgcgaaaaaaagtcgttcttattttgcacgcagagacgccgaaaagcaaaaacttttcaattttttcaaaaaagtttgcatttacccctttacaaaatcgaaatttcaggtataataatcatcgtccggtgcgcctctgtagctcagtcggtagagcaggggactgaaaatccccgtgtcattggttcgattccgatcggaggcaccacgtcaaggaaacccaatagggtttcccaatatgcggccgtagctcatctggtagagcgccaccttgccaaggtggaggtagcgagttcgagcctcgtcggccgctccattaaggagcagcaacagttgctccggtatggcccggtagctcagttggttagagcaccagcctgtcacgctgggggtcgtcggttcgagcccgatccgggtcgcttcgtcggaatgtcagtcgtttgtctggcagtcttacaagtaagaccgccgtaacaaactctgaaattcctcctcttccccacaaaactttgcttcgcaaatttttgcgggggccccgaaattcgcaagaatcgctcgggagggtgcagggacaaatgcaccgaatatgcggccgtagctcatctggtagagcgccaccttgccaaggtggaggtagcgagttcgagcctcgtcggccgctccattggagtggtattcatcactcccttatatggtgacgtggccaagtggtaaggcaagggtctgcaaaaccctcatccaccagttcaaatctggtcgtcacctccaaaagattcccggaagcttcggcttccgggattttttgttttgcactgtcccctgccgggggcaaggcctgtgactgttcaaaacacccttataaaactctattactactatggacttttgaacaactagaactttttagcttatctacgtttattcctagttgttcaagatgaacaactagagcaaaaagcaccgtttttgttcggttagcgtttctagttgttcaaaacccctctgctttttgaacagctagagatacaacgtatatacgccatttatttttctcaaggctgaaaagtcgccgaaagctacgcttttctgcgcattattttttagttgttcaaaaccccctgtgtatcataggagacttttgaacagtcgcccttgccgggaagtgggacgatttaaaatgtgctccgctatcgggttgcggcacccagcatccgcatcgtgccttgggcggcacttgcgtcttgctggccgctgccccaacannnnnnnnnnatgtttccgccactggcggcggtcgtcgtcgttgcactctagccatcttcagcggaatgattatttttatttcgcgtttggagcgaccgcgtttgcgcagcaatgaaagccccagtggggcttttaagcggcagagcggtctgcgttagcagatggaggggctttgccccgacaagctctgcggagcgctccaaacgctattttcacagaagggctgcaatgattaaagtgcggtctgaattgcaaatgccgttttcctccacgacccctcccgtgaaaaggggattcagaaaagcccgcaggcttttctgaatcccgaacaaaaaaactaattccgctatttatgcgcagagcgcacgcggcgcgcattccaaaccgttctctcagaaccgcagccgcatctggtaccacaccaccccgccgtgggtggaagcggaaacgccctcgttcacaaagccgaactttgcatagtagtgcaaaagcttctccttgcaggtcagcaccagccccttgcgcccctgtgtgtgggcatctgcgatggctctttgcagcagcagcccggcatagccccggcggcggcagcgcgggagggtgttcaccccaaagatcatctgccatgcgccgttttcatcatgcagggcggcatccgcgtacatctcatcggtcaggtcgggcatatcggtgcaaaagccgtccacaaaagccaccggctccccctgctcaaacagcagccagaaatgctccgcatagtgtgccagccgtccggcaaattcctcggccgtggcagcctccgctgccgggaaacaggccgcctccacggctgcaatagcctgtaaatcatccatagtcgcgttgcgtatctccacagtatctctcctccctttttgtaatgtcagtataccacagctgccgcgcaagggcaaaggcagcttttctgtttgcatctgttccctgtccgtgttacaatggctatactacgcttggaagggagttgaaacgccatgcccaccgaaaaccgcactaccttaacgccggacaccccggtgcgctacctgaaaggggtggggcccaagaccgcagagcggttcgagaagctgggcatcgtgacgctggcagatctgctgtgccactacccccggcgctacatcgacttttccaagccctactccatcgcagaagctcccgccgacaccgaatgcgtggtaaaggccgaggtgtttgcaaagcccggcgggcgcattctgccgggcgggcggcggatggagcgcatcaccgccggggacgatatagccagtctggagatcacatggttcaacaacccctacgccacccagaaattgcagctggggcaggaatactattttcagggcatcgtgaccggcgggatgctgcgccgccagatggtcaacccgcaggtgcgcactgccgagcagatacaagccgcgccctttgaggccgtttacccccagaccgaggggcttaccagcagcgccatctcccgctgcatccggcagcttttgccccacgcggagctgctgcccgacccactgcccccggagatgctgcaaaaataccgtctgctgcccaaggccgaggcggtgcgcgccatccactgccctgccaccgaggaacaggccgcagcggcgcggcggcggctcatctacgaggagcttttggtgctgcaattgggcatcgggcggatgcgcagccgaggcgctgcggccaccggcgctcccatgcgccgcgccgatccatcccctttctggcagagtctgccctttgcccccaccggggcgcagcgccgtgcagtggaggagattttaaacgatatggcgggcgaaaccgccatgaaccgcctgttgcagggcgatgtgggcagcggcaaaacgctggtagctgctgccgccatctgggcgtgcatccgggcggggtatcaggccgcgctgctggcgcctaccgaaattctggccgcgcagcacgccgaggggctcaaccggctgcttgcccccttcgggatgcgggtcgccctgctgaccggcggcatgaaggccgccgcccgccgcaccacgctggctgccatccgcaaggacgaagccgaccttgtggtgggcacccacgccctgatgagcgaaggggtggagtttgcccggctgggtctggcggtcatcgacgagcagcaccgctttggggtgcgtcagcgcggtgcactggcagaaaaagccgcgaacccacacctgctggtcatgagcgccacccccatcccccgcacgctggggctgctgatctacggcgacttggacatctccattctggacgagctgccccccgggcgcaccccggtcaagacccggtgcatcaccggcaagcggcggcgagacctgtaccgctttctggacagcgagattgacaaagggcggcaggtatatctggtctgccccgccatcgaggatgtgccggacggcgggctgaacgccgtcaagacctactacgaggacatcgccaaggcgctgctgcctgaccgccgggtggggctgatgcacggcaagctgaaacccaaggagaaagccgccgtcatggaggatttcaaggccgggcggctggacgcactggtgtccaccaccgtcatcgaggtgggcgtggacgtgcccaatgccagcgtgatggtgatcgaaaacgccgagcgctacggtctgagcgccctgcaccagctgcgcgggcgggtggggcgcggcgctgccgagagctggtgctttcttgtcagcgacaataccagcgaggccgtgcagaagcggctgaaattcctgtgctccaccaccgatggctttgccgtggcacagtacgacctggagacccgcggccccggcgactttttcggcagccgccagcatggtctgcccaccttgcagatcgccgacctgatgaatgacacccgtaccctgcacgccgcccagagcgaagccgccgcattgcttgccgccgacccgctgctggaaagccctgcccacgatttgctggccgcgcaggtgcagcagatgttcgacaaggccgggccgatgaactgaggacgtttttgaatgcgctccgctttgctttgcgcaacttcagcggaaaaaatattttttagttcgcgtatggagcgaccgcgtttgcggagcgcagtgtagcaatgaaagccccagtggggcttttaagcggcagagcggtctgcgttagcagatggaggggctttgccccgacaagctctgcgggccgcgatatacgcttttttcacaggaggggccgtgatggcaaacggcatccattactacaacttcacgcataaaaaagcgggtcagaagcgctcaggcttccgacccacgatagaatattattctttgctcccaacaatgttttgcaggatgcgggcggtcagggcatccagctttgtttccagtgcgggcaggtgcagcaggcggtagagccgctgatatacggcatccaccgcgtagcccgcagcggcaaccagcagcaccgcaccggtcaggtacgccagcgagggcagcagcgccccgccgaaccggggcaggtctaccagctgccacagcagcgcccgggtaaaatcgctgtcgtgcagcagatacaccccgaaagacagcggtgccagccggaatacccagcaccgccagtagtccgagcggatatggatattctggaacagcaaaaacattgctgccgaggcgatgaccgtagccagtgcctgataaccgttgacggtattcacaaaaccgttcaggtgcagggcgttttccacccgcagcgccagcatccggttgaacagccccgccgccgaagctgccagatatgccagcaaacacagcccgctgggcacggtcacccggtatttgcggaaataagcggccataaaatacagagtgtagaaccagataaagctgtacccgttattcacaaatgtttcatccgttgcccagtagaacagcgtgccccacacgctttgcagcagcagcgccaccagcagcagcgttttgtactgccgccggtcaaggctctgcaccaccgcattcagcaccggcaccgagaggtacatcagaaaataagccgaggcgaaccagtagccgttggaggtaaggggtaaaagtgcccggagcagcgaaatggctgaaagcggcaccgcacccgccttgaccgcaacgcagaaagtgagcatggagtaaaaccacacctgtgccccgatgcggaacagccgcccggcgcggacagcccccttgcgctccgacagataatagccggaaagcattacaaagcagttggtggacacacgcgccagaataaacagcagccagtagatccagaatgccgccgacccctgcggtgccgcactgcccagcccgccgtgcccaatgccatgcatcagaacgatcatcaccatactgagaatgcgcatcgcctcaaagccgctatgccgtttctgctcttccataccccattttccccctcacattacatttcccctgtttccagctgccgcaaagcctgccgcacctgctgctccggccgcagccacgcttgatagtacgccgcattgtgctgtgccatggctaagatcgccgccgggtctgccagcagctgccgcagctgcgcctcgcactctgccggggacgtatatgttttatagtttttgccctcttcaaagccgcccggcagggtgtaccgcagcggctcggtaacgatggcgcgccccgccgccacatactcggccagcttccagccggtagagccatgcaatccggtagatgccacacaaatttccgtgtgctgcatccggtgcagataggcgcgcttgccggtcagcttgtccggcaaaatcagttccgggcactgccgccgggcgcaggcgttgtccgatacgccgccggtgaactgttctggaaaagcagcttgcagccggtgcagcagctcgatgcggtctgcgttcacctgccgccactctgcctgtaagtccgggtattgctgcaccgccggctcctccgggtcccacagacgggtgaggaagaggatgcgcggctttttgcgcacccgggtcagccgggcttcaaagtcctgcgggtagcagcgggtggaaagcgcccactgcttcaggcggctctttgcgctgcgctccgcttccagcggcgagcccggacaggtaacgtagtagttcagccccagcggccgcagttttgcggggatatcgcccgggaactgccggttcttctcctccgaaaaggaacgtttgaacaccacatccgcccggtggaacagtgccagcaccgccgccgggtcgttgtagaagtagccgtccatcaggtcaaacaccaccgtgcggccgtcgatctcggtttccagcagcgcttcccgggcaaggggattgccctgccgcacgtcctgcacccgcaatgtcagttccccgcgctttgccagcagggtaaaacccgccagaatgccgctgacgtgggcagcgccctcccgggtggcaagttttattgtgacctgcatattccctcctatcggtggaacagcccggtgcgccgctcgcccatggggatgacgtcacagaacacacaccggctcttggtggaaagctgcacatccttgtggtagcagccgaaaaaccatttttcgtaggtcagtttgagcaagatctcatccagaaacaggtgcagacggttgctttcgccaagggcaagggcggtaaaatccaaaaatctgcttggtgcatcgtgagtcagcacataatctaccttgtagtctactttctctaagttgcggcggcaggtgtcgtactcctcgtcactgggcatctcctgcttccaccagttcacgcccggctcccggtcgtccttatcctgactttccgcaccaccgaagcagagataggtcttgccctccagctccagcacgctgccccggcacacatggtacacgttgccgccaaggctctgtaccctgccgccgaacagctccgtctccgggtactgtgccagcaggtcgtagttttcgtggctgccgtccagaaacagaatcgtgtaggggcgcttgcgcagccagtccagccgcttgcgctctgcggcgctgccgtcccacacaaagccaaaatcccccagcaccaccacggtgtccttcttgcccagccagcgcagcttgccctgcttgaagcgctggatatcgccgtgggtatcccctgtaagatataccattcctgccctccctgccggagcgaaagaacggtgtaaaacaccgcaaagctcttgtaacaccccggcaaacctgttattattatagaacacagcacgcttgctgcaaaattgatcttccggcgcgccgcacagcgcagccgtatctagtatattttatcgctttttaaaggaattgtccacatgaaacgtatttttgcattggttctttcatttgtattcctgctcagctgccttgtgctgcccgccggggccatgttcgaccccagcccggtttatcaggtgcaggctgcaagcgcctatatcgtgaacacggataccaacattatcgtctatgataaggacagcacaaagcagatatctgccggcggtctgaccaaatatatgacccttgccgtgctgctgaccaactacgctgaccagctggacagcaccttccagatgccctttgccatctcggactatgtttataacaccaacaacgcagatatgcgctccaacgagactttcacctaccgggaagccatgtacgccatgcttacccgcaatgccaacgaggcagccatgggtgtggcgtacaccctttccggcggcgatctggacggctgggtggcgcagatgaacaccctgtcccagcgcatcggcaccaccgccagcagctggacagacgcctgcggcatcgacagtggcaacactacctgcgcggtggatatgtacctgattttgcgctacctgatgagctttgacgcctttgtggaggtgtccggtgcgcccagctttaccatgcccgccaaggagaagcaccgctcctcctcggtgctggtcagccagaatgccgcgctgagcaaagccagcggcggcagctattaccgcagcgccatgcagggcggcatgtgcaatgtgaccgcctttaaaaacgataccggcacccagagctatgtttcgtggggtaacaaggacggtgccacctatatcttctgcgtgatggacagccccgacagctgcgataccttcggctacgccaaccgccgccccgccctgttcgagacggtcaaactgatggactgggtattcgacagcttttccattcaggctgcgctggacactgatttgaccattgcggagatcccggtccgatattcctccgacaccgacaccttgcagctgtaccccaacgacagcatgatgaccctgctgccctccaccagcgacggcaccgtcacccaaaaatacttccatctgccggactacgtctgcgcgcccatccagcagggcgacgtggtgggcacagtagagctgaagctggcgggcgagaccatcggcgtggtggatctgatcgccgggcaggacgtagctcgcaacccgctgttgttcggggtggacaaggtgaaggagttcctgaccagcctgtacctgaaggtggtgctggtgctcagcctgatcgctggcctgatctatgggctgtggctgctgtgcgccaactggaaccgccgcaagcccaccaaaaagatccaccgccgctattaagtaaagcaaaagccctgcaccggatgcagggcttttttctgtattgcagcgcctcaggtgcggtttttcaaaagttccgtcaggctgcggaaggtttggccgtggttgccggtaaccgtctcggcgtggagcaggctgctgagaacgctttcctccacgcactctgccaccgcccggaacaaagggttgatggcatcatcgtggagcagggtcatgggcagcagggctttctccgaatagtgcggcacccggttggcggtggtgaaggcgatgacgatctcgccgctgccgttgccgcagtaggaacctgtgcgggaaagccccaccagcacccggcggcacagccgccgcagctgccgctcgctcagggggatatccgtggccagcaccgtgatgatggagcctttatcctcgtggggtgggatgctgttattcagcagcgtatggatgggcgtgcccgccacgatgaggtcatcgaacagcgcgtgattggagagcaccaacgcacccatggtgtagggtttgccgtccagttccaccacccgggaggcggagccgatgccgcctttcaggccgtggcaacgcatcccccgcccggcacctacggcaccctcggcaaaatctgccttgcagtctgccagcgcggcaaaaacgtgctgctcggtcacatgaagcccccggatatcgttcaggccgcagtcgttgcactcgcagaccaccggattcacgctgccggtggtctcgcagatgtcggggtttctctccagcatatatttcaccagcgcggtctgcgccgtgcccacgctgagggtgttggtaaacaggatgggcgtttccagcgtgcccagctcgtcgatctgcacaaggccggtggtcttaccaaagccgttgatgacatagctggccgccagcactttttcgtggaaaatatccccttggtgtggcaacagcgccgttacgcccgtctgcactacgccgtctgccaaggtgcagtgccctaccgtcacccccggcacatcgctgatcttatcccgcgcacctttgggcagcgtgcccacctgaaaaccccattcgttccctgcaatgcccatcgtagctcctccttgctttttttctaaggtgtatcatagcatttccgctgccaaaagtaaaccactgtaacaagccggggcgggcgcagaaaaaaggctcccgcgctgcacaaaatcattgaggtgccgctgcattttccgtcggccacgatcttctgagcgccgcataggagaccagaaagtttgccagccaccctgccgggacggcaagccagacaaaggcaatgccaaagcgcggtgcacagagcagggcaacggacaggcgaatggcaaggtttaccatatttgcaatgaggaacgggcgcatgatgccaagcccgcgcagcacgccatcggtcgccatcttgatgcccatgaagatgaagaagtaacccagccaccgcatataatcaccggacacctgataggccagcgccgttccgtccttgcccagaaacagcgaggagatctgggtgtgcagggtttcaatgaccgcaaaggcaatgaccgcaaagcacaggtccagcaccagtgcagcgtggtagccttttttgaggcggtcgatcttctttgcaccaaaattctgggagatatagggcgagaccgcattgccgatggagacaaaaatcagcgagaaaacattttctacccgcatcgttgctgcatatccggcaagcgcctgtgtgccaaaggggtttaccaccgcctgcacgatcatcatgccgatggacacggtggactgctgcaagaccgacggcaccgcaatgcggagcatggaatacagctcctgccgatcgaatttattaaaggggcttttatattgccgcatccggtgcaggaagatcaaaaacgaaaacaccgcagaaatgccctgtgcgatcaacgtggcaagggctgcgccaaacacgcccaagccaagccccgccaccatccagagatccataaaaatattcaggatggaggaaaagatcagcagccccagcgggatcctggactccccaatggaggtaaacatggtggaaagaatgttgtacatgaacaaaaacggaaagcctacaaaatagacccgcagatacagcaccgcgtcctccagaatgtcggcgggggtctgcaagccgctcatcatagcacgggaaaagctaaagccaaaaacgccaaggacaacgctcaaaaccagaaagctgagcagggacgttgacacgatggttttcattttgccatagtttttagcgccaaaatagcggcttaccagcacaccggcacccacaccggcacccagtgccacgcaaataaaaacattggtcagcgcagcacaggcaccgacagccgccagtgccgaggagccgacaaactggccgactatgatggagtccgccatattatagacctgctgaaaaaagctgcccaggatcattggcattgcaaaaaccgtcagcgctttcagcggcgcatctgtgatcaaatattcatctttcgacatgatctatttcctttcaagctgtgtttctctcaatttttttaaattgctctggccaagtataccacgctttttccctactgaaaagctcccgcttgcattctcgcaaactgcttttataacgtcccgtttccctttctctcgtcttgacaagcccttttcttccgattacaataccaaaaagagccggcgggcggtctttttgctgcctgctgccacaatcttccgggaaaggaactttttcatggaaccaaaaacaaaacaatctctgctcgttaccgtggtaggggtaacgctttttgtagcgctgctgcggctttctgacgttctggcctttgccgcaaagctgatagatctggtactgcccattctggcgggcggcattctggcgctttttatcaacgtgcccatgaccggtctggaaaagcggctgaaccgcctgttcggcaaggccaaaaagcagccctcggcgaaagccatccaccttctcagctttttcatcaccctgctgggcgttgtgctggtgctggtattggcgctgactttgctgattccggagctggtgcagtccttccacagcctgtatgtgcagatcgaggccaatattccccgctggactgcctatctcaacgcacaggatgctgacatgggctggctgatgaactggctggagggcatcaactgggagcagctgctgcacaaggtcaccgcaagcatcgacacggtgctggtcaatgcggtaggggctgtctctgccacggtgaatatcgcgatcaccgcctcgtttgcgctgatcatctccgtctatatgtcccttagtacggagagcctcggccaccaagcccgcacgctggtgtgcgcctacctgaagcccgcccacgccgccggggtgctgaagttctgccggctgttccggcagtcctttgcaaactttttaacgggacaatgcagcgaggcagtgatccttggcgttctgatggctcttgcattttccgttttcaagatcccctacggcagtctggtgggcgtgctcaccgccatctgcgccatcatcccctatgtgggtgcactgatctcctgcgtggtcagtgtgttccttgtgctgttggtagaccctgtgctggcggtgcgctgcctgatcgtgtaccttgccgtgcagtttgttgaaaaccagttcatttatccccgtgtggtgggcaaatccgtggggctttcgccgctatacacccttattgccgccatgatcggcggaaagctttttggcatcatcggcattatcttctttatccccctgacagcggtggtcatcgagcttgtaaaagaggacacctttcggcgtctgcgcgcaaaagagcccctgcaataaaacagcgtgcccggaataccataacccctgatacccttccccggtgtcaggggtatttttatgccgtgcagctgcaaagcacgcggttgttcgcccttttccatgcaaaatccttcaaaaaacagcttgaaacacttttgttacaatgatacaatatgattgttattttatgggaaaatcggcgtatgccccgtgcggacaggccgcgagcgtaggggttcctgtggggtgtgtaagaatcgctaaggcagcactgcgctcctgcacttgcgcagtactgccttccgaaaatgtgaggaaagtatatttatatgataaaaaagatctcccgccgctcctttttgcaggcttgcagcgttgcagctgccacggcagcgctgaccgcctgcggcggcggcaaggctgaaagcaaaacagcagatgcgcacgaagccgtcacctttatggcaccttataaggagatagaagcctttattgagcaggtgcacagcgtttacccggaagtgaacatcgaggtcgtgccatacagcggcgataacaccaccacctgtttgcagaatatgtttgcggcaggcgacctgccggacgtctgcaccttgacctactacgacccccagatcgatctggtctccgacaaactgctggacctttccggctacgattttacggataactatgtggagtcccgtctgcaggacgtgttcgacaacggtgccatctatctgctgccctcggtttacaactgctacggcatcacctacaacaagaccctgctgcgagaacacggctgggagctgcccaattctttcgctgagctggaagtgctggctgcaaaagccaaggaagccggggtcgatctctgcctgccgcagatccagtacccgggctacggtttccagtatctgtgcaacattgcagatgccgatttccttggcacactggacggcagactgtggcagaaggattatctttccggcaaggcaaacgtcagcaacacccccggcatgatgcaggcaatggcgtatgtcaaaaagtggaaggacatcgggatgctgaacggctccggcgatgctcttgacgacaacgtgaccctgcagaggatggccgaggggaataccctgtttttgatcggaaacaccaacggcattgtggaggcagacggcaacgccgataaattcggcctgatgccctatctttccgaggacggcacccagaacgtttttgtgctgaatgtgaaccgcttctacggtctgaataaaaagctgaaacagaacccccaaaagctggaagatgcgctcaaggtgatgcgtgtgctttccaccgttgcaggcaccagcgctctgcagcccgcaacggcgctgaaaagcagcctgttgcccttcaagggtgcaaaggcagacggcacctactatgccgacatcgccgataccctgaacgcaggcaacaccgcgccctttatctattccggctgggaaaacaccttcgtgaccaccggccttaaaatgctggacttcatgaagggcaacgccaccatggaggatgtcatccgtcagctggacgaggatcaggacagtgtggtgaacaacaccccggatgtcatcactaccgttacggaggagctttcgcagcaggactgcgccatgctggtaggccgctgctttgcacaggctaccggcagcgaccttgcgctggtctcgctgagcacatggatccccggcaaccccaccgagcagaaccaccacggcgtagccgccaagctgtacgccaagggcattacggattacgacctttcggtcatcctgcccaccggctggaaccgcaccatccagaccgtcaccctgaccgggcagcagatcagcgacctgctggcttctggctacgatgcctacggcaacggcaagggctacccctatgtgctggtaagcccggtgcagccggaggcgggcaagacctatcaggttgccatctgcggtgtgagcgaccagctggctgccgaagcaacggtgacagacagcggcgtggtgggcatggatgccgcaaaaaccttctttggtgcttacaccaccatcagccgggcagacaccgcatggagttgaataaaacggacaggagatactggatgtgaacaacaaaatctataaaaagctgtttgtgggcttcggctttgtcagcatcgtgttgatcctgaccctttttgtcatgagccagacctacatccaaaaccttgtctaccacgagcgtctgagccagatggaagaggtcacccaccagatgttccacagtctggaggatgtgatcgacaaccactgggacgaggtggatgtgcagtgtaattatttatactacaccccgctggagaccgataccgatctctaccgctatctgaaaaagctgtcggagctttccaattaccatgaaaaacagatcgacctgatcgccgtggactctgccggacattattataccacgcatggccgcacgggtctgctgcgaggaataacctatctggaaagcgcaccggagcgggtcagctatgtttccaattcgttgaccgtggacgactcccggatggtgttcctgaaacagctccccacccccatcacactgcaaagcggagagaaagagatcaccctgcgctactttggcatcgcccagagtatgacccagctgaacgataatttccgctgcgacgcctacgaaaataacaacagcgtctatgtgctggacaacaacggcttcaagctgttcaacgccaatgacactgagctgctgaaggagcataacgtatacaccgtgctctcccagatgtcctatctgcacggttcttcctttgcagcagcaaaggagcggcttacccgcacaggctcctgttattccaacgccgtgctggacgggactgagtattactacgccctgaagcagatggaaaacgcccagtggacgctggcgttccttgttccggcagaatatgtggccgtgaatacgcagaagctggtcaatatcgtcatggccgttattgtaggctttgcaacggtgttttcgatcatggcagtcattgctggctggttccttttgcgggaaaagcagcagcgggagctgcaggctgaaaaaaagacgaacctccgtctggagcagtataacatccagctgacgcaggccaacgacgaaatgcggcgggcgcaggatgctgccgccgaggcgctgcagtccgccgagcgtgccagcaaagccaagacggacttcctttccaacatgagccacgatatccgcacccccatgaacgccatcatcggcatcaccgccctgatgaaaaacgagctgcacgagccggaaaagcttgccgagcatctgggcaagctggaaacctccggtcagctgctgctgggcatcatcaacaatattctggatatgagccgtatcgagagcggcaagaccaccctgaatgtggaaaagatgaacctgtcccagcagatcagtcagctggacagcatcatccggcagcaggcaggccagcgcagtcagacctttacggtaagcaccaatctgcagcacgaaaacgtgctggccgaccccaaccgtttgaatcaggtgctgatgaacatcctctccaacgcggtcaagtatacgcccaccggcgggcatatccggttggaggtggaagagctgccccggaacgagcactacgcccggtaccgctttgtggtgcaggatgacggcatcggcatgagcgcggactaccaaaagacccttttcgacccctttacccgtgaggagcgctccggcaccaacaaggtgcagggcacgggtctgggtatggcgattaccaaaagcgtcatagacctgatgggcggctccatcagcgtagagagtgccaccggtaagggcacccgctttgaggtggtgctggaatttcccattgacaccaaagcggacacggtgcaaaaggcgcaggcgctcccggaggaagaagagaccacttctcccctgtccggcatgaagttcctctgtgccgaggataacgccatcaacgccgagattctgcaaatgctgctggaaacaaaaggcgcaagctgcaccatctgccccaacggtcaggagatcgtggatgcctttgccagcgtgaagcccggcgactatgatatgattttgatggacgtgcagatgccggtgatggacggcttggaagccacccgccgcatccgcagcggcgaaaacccgctgggacgcaccatccccatccttgccatgaccgccaacgccttccttgaggatatgcaaaagagtaaggaagccggcatggacgaacacctgtccaagcctgtggacatcagcgcactggaacaggtggtaaagcgcttccgcgttacccccccccgaaaataaatagcggtctgcagcgtttttgccgcaaaccaccgcatgaccttgcataaaaaatctgctgcccctttgcccggatattcttgcatccggtacggggcagcagttttttgcgttatagggggaatgttacgctcagatgggcatggtctggtagaaccagtccgaaatggccttgcgagtgtcggcgaagaactttttcaccgggcaggcggcatcccgtgcttcctgttccagatccgtgcctgcggggaagttgcggatgacggtatacgccaccgactgcggcggcagcgacatcatcacagccgggtcgtgcaccacgcagatctgctcgcctaccgcaagggtagcggggtcggaggtggtcttttcgtcatggtcctgccagacggtgctgtcggtaacgatcatctgataggtctcctgctcttccgcagtcaccagaatagactccaccttgccttccacggtgcggctgacaccctctactacaccataatagtagagcttcttggaaaacagcgccgaagcagagggcagcacgctgacgctgagcagcagcaccgcaagcagacaaaagagcgagcgataggtctttttcatagaaaacctccatttttcatgttgcagcggagcgcccggcgctcccggatgccttattttaccataactaccgtcggatttctatatccgggcttaaccggccacggaaaatcagcttttacacaaaaaggactgccgtgcatagcagcgcacagcagtcctttttatgcttttatccgtttacttgctgatggaaagggtgccgaatgcagtctcttcaaagtggctgctgtacagctcctgcatcagcttgatgagcgagagggtatcctctgcgccggcggtctcgtagcaggagtgcatcgccagctggggcaggccgatgtccacgcagttcatggacacctgtgccatcgccagattgcccagcgtgctgccgcccaccttatcggagcggtttgcaaagtactgcagcggcacaccggcgcgggcagccagctcccgggcagcggcaacgctcatgccgtcgctggtgtacttctgacctgcgtgggtcttgatgaccacgcccttgttcatgtaggtgcagttgttcacatcggtgtgctccgggtggttggggtgcacagcgtgggcgttgtcggcgctgaccataaagctggaagccaccgcgcggtggaagtcctcgtcgttgccgccaaggctctgggcaatgcggtgcagcacatcgtacaggaaggtggaagctgcgccctgcttggtgccggagccgacttcctcgttatcaaagaaggccgccacgccgatggagcgggcgttcttggcggtcagcagacctttcaggatgccgtaaacgcactgctggtcgtccagacggccgcaggagatgaactcctcgttgcagccccagacggtggccttttcccgcacatagaggaacaggtcgctgccaaggatctgctcctcggacaccttcagctcctctgcgatcagctttttcagcgcgccctcctcgcaggcaccgcccagcacaggcagcatatccacctgcttgttgaaggaagccttatcgttgacctcacggttcatgtggatggccacgctggggatcatcagcaggtcgcggtccagtgccaccagacgggatacgatagcgccgttctcctgcaccagcacacgacctgccacagacagcggacgatccatccatgtggcgcagatcatgccgccgtagccctcggtgttcagcttggtgtagttctgccccatgtggatctcggcgttctccttgatgcggaagcagggagaatccgtatgggcggcggcaacgttgaagctgtaattttccagctggtcgcccatgcggaaggcaatgatgctggaaccgttgcggcagacaaaatagtccttgccgggttccagcgcccacttgcggctttccagcagctcggcaaagcctgccttcagcaggatatcccgcacagcggcggtggtgtggtatgcggtggggttgccgtcgatgaaggacagcatttcacggacttcggatgcgatcataaaaataaacctcctaatttcctgagaaaagagccggtcagtgctgaccggccctttttaagcatattcaggttacttttttgcagcagtctgttcgcgctttgctagggcgggcagaatgaatcccagtacggtcaacaccacgggggtgatgacgttcagtgcaaaggtgaaggggtccttatcatacatacccagcacgcagcacacggcggtaacggcaaagcaccagccgccgaagaacttggccacggcctgatttttgacaaagcggtactcggcggggatggtatcgtaggcgttgcgcagggcgatgtaggcggcaaacacccacagatagcgcataggcatacacacagagttcagcttggtcagctggcgcagaacggcagcagcaccgggcacgaaggactgtgccagaatgatggagccggacagcaccgccaccatcttgatgccgttgctgtgcacgccgtgggcgttgaccttgtgcagagcctgcgggatgaactgcttggtgtgctcgttatccagcagcatacgcagcggtgcgtcgatgctcaagatcagcacggcgagctggctgatgacgttgcacagggcgtagatgatcatgaacagatcgcccacatggtagtactgacccagcttctggaaagcccagtaggaactgttggcgacataggcgttgaagctctctgcgctggcgttgatgacggcggggtcgaacatacggctcatggccagcgtgcccagaatggcgcaggtgaccaccatgacggccagcgcgatcatgccgcgggggaagcccttgctggggttctcgaccttattgacgtagggagagatcttctcgcagccacccacagcgaacaccagaatggacagagaagtaaagtaggtgacgttgaagttggggatgaggctgctaaagctcaggtttgcgtggacgtactctgccgtggggttgatggccggggcagcaaacatcatcacgatgtacagcagggacatgacgaaggtgcaggtgcctgcggcagttagcagctttttcagggggttcagacccagacttgcaatgtagcagcccagcagcagaatgcagaaggtagccagctggatgtagcgggtggggaaggaatcgtaagtctccgcgttgcgaaaaattgcccagctcagcgccttcaaaaagccgctgcccttgctggcaatgtaggtgatgtggcaggcccagtaggtccaaccggcgtagtaggccagctttgcgttggtggtctggtgcagccaggagctgacgccgccgccctcgtttttaaaggcagagcccagctcacccaccatcagcgcataggggatgaagtacaggacaaacatgaagatccagctgaagatgacctgcggaccgttaaagtacacaaagccgttggtaatgttgccgaagccccagaccgtagaaaaggccatgaaggcaagggtaagccacgagatctttgtggctttttctttgttagacatgcggacaattcctctctttcttttccacacagggcggaagttcctgtaagaaggccaaggttccgcatatactttgcaattttactaaaatacagcagtactcgaccgatcactttgacagtatagcataattgcagattgtagacaatctgcaatttccataaaatgattggtcaaaatttagacggtcagccaaattccccttattttgctgcttcgtccgctgcctgtacggcgctgttcgcgctgcgcatccgctccataggctccatgtagtgggcgtagacggcgcggcaggcaacctcggtgtcgccgcttgccagcgcctcgtacagcttggtgtggatgccgttttgccgctgcgccagcgtctcgtggttggagccgctgttcgccccaataagcaggttgccgtagttcaggtcgtcccagaatttcagcagtctgggcagccccgcccgctgcacgatgaccgcatggaagcggttgtcgttctccacgatctgcgaaagatcccccggccggacattgcgcatctcctctaagatgccgcgcagggtgcgcagatcctcctccgggaatttgcagtcaaaatagcgcagcgccgtcatttccagatttgcccgcagcagatagatctcgtaggcgtcctccggctttacccggcgcaccgagcagcccacattgcgcgaatattcaaccatgccctcctgttccagctgccgcagcgcctcccggatgggtgcccggctggagccaaactcctcggccagtttctgctcggccagctttacgcccggctgtaattccccagtaaggatcttgctcctgatggcagaggtgatactttcccgtaaagtctgaaaggcaaattcgcccatgacttttatcccccttttctcttctatacgttcttttttttgccgcacgcagtccgcagccgctgccagtgcagccgcaggcctgtattgcgtgcgccttataaggataccacgaaacggtggaaaaataaagttttctggcaaaaacaggtactttctcccctctccgtcatcgaaagcctgtacacaaaaaatgcccccggagggcttattgcaactctccgggggcatcctatatacgttatgccttggcgcacacggtcggcatttactcgatctcgatcagattcgggttctcaggcagagcctttgtctgctgaggagcgggcagctggatgtgcaggacaccatcctcgaactttgcgtggatgtcctccttcttcacttcgcccacatagaagctgcgggcgcagctgccggagaaggtctcgcgccgcacgtagcgacccttgttgtccttttcgtcattgctgtggctgcgcactgcctgaatggtcagatagccgtcgctcagatccatctgaacgtcttccttcttgcagcccggcagatcaacgtccacttcgtagccgttgtccgtctgcttgacatcggtcttcatcatgtttgcaccgcgcttaccaaaggtgtcgcgggcttcgcggttcatcgcacgctccagtgcaccctcgttccagaacggatcaaagagatcatcgaacaggttctcatgaaaaacagtcggcataaacataaaacatacctccaatcccggcgttcgggtcggggcaaaaactttgaagcgtccattcggaaaggctttccggggaaccttgcggctctccttttgcccttcctcctgagcacgccactgttatagcacaattatttagcactgtcaagtgtagagcgctaaaattcataaaagaataatacttttgtcacagcttctgcgatttcttcaaaaatgctgcgcagaagcgtgtttaattccgttcaaaccccagataacgcgtaccctgaaagctcagctttccggtgtcgccttctgccagctggccgtattccgtgccgctcagccgcagctccatgcggtcgccgctttccacctgaaaggtcacataataggtggtagcgctcgtgctggtgtagccgtgggcgccggtcatgtcccctgcattggcggtatgatggcgggaaacgttcgtccgcttggccaccacagtggccgggacggtaaggcgcggggacgcattattcttgctccatgtgcgcaggttgcccaccacggtaaataagatcatgcccagcacaaacagaaacaccagcgggaacaggatgctgaaaagcgcgtcaaacccactataaaacatattacccctccaaaatttcttccagcagctgctttacgtcctccagaaaggcattttcgccaagggtgttcattttaaagaacaccgcctgactgccgcccgccgcaatggccgacagtcggataggcccgtccccgttctggaacagggtcagcgtcaggctaaggcggttgccgcccaccatactgtaccgctcaaacacccgcacgctgcaccgggcgctgccctccttgaaatcgctgccggcttccagctctgccgaccagctgctgtccgggatggcgtgttccagcttgcggagcagggtatcgaagttctggttgcggatggtcttttcaaaaatagccatagcttcctccttttgcaaaatgcagcccctttaccctgaatacgaataaaagcaggcaacgattgcagcgcccgcccttattttgctgcagtcaagctttcttttttcgcaacttgggtgcggtggcgttgtagctcatgtccaacaccagacggagcttatcctccggggcgctgccgtccagcgcggcggtgatccagttttccttgttcatgtggtaggcagggtaaaagcccggttctgcccgcagggagccgatgaggatggggtcacacttcaggttcacgatgtccaccggctgctgcccgggcagccccagcttgcttttgggcacagtggtgaccagcgcaaaccatttgcggtttgcctcatggcggaacaccgccgactccggggtgtccatccacggataatccggctctacgctgtaagtatcaaaaatgagctgttccaagcccttgcggtccatgggctcgccccctttacggctgctgtgccaacagctgcgccagcacatcctccgggcggggggtgtggttttggtattttgcccgcagcggggcggcggcgttgtccataatgtagggcacacccaccacgtccagcatggtctcgtcgttgtagttatcgccaaaagccatgacctgtgcgaggtcgatgccaaggatgcggcacacgcactgcaccccgatgcccttgttggcaaaggtggtatcgatccagaacggccccgccacggcgcagttggcctgtttccagcggggcacaaagcgctccacatagttctccacaccctcgtgcaggtacaccgacaccttggtgatgtcctccggcacctcggcggggctgtgaatgatctggtagtggttgcccacgaactgcacccgctgcagcatgccaagaccgcgctccatcaggtaggcggtgttctggccggagagcatcacctcgccctgcccctcgctgcgggtccacatatcgttggcaatctcctctgccagcgcccgcggcatgggatttttggcgatgcactgttcttcctgaaagatggtgccgccgttttcacagataaacacacagcagtccgccaccggtgcaaaaagcttgcgcaggctggtatactgccgcccggaggccgggcagaaccagatgccccgctgatgcagcgcccggatctgttcgaatatttcgccctccagttcctttttgccgtattgcaacagcgtaccgtcaatatcgctgcaaaccagtctgatgtccatggctgttattccctttccgttttttcttattttaccacggttttccgctgcggaaaagccccgggcacagcttttgtgtccttcccctgtaccgcgctcagcgcttgggctggtagtgcatactggacacattataaatcgtaacaaaggcctttgggtcctcgcggttgataaagttcatcaacttctgatactcgtttttgtccacgatggtaatgatctcgttgtgcttttcaaagttatatgcaccgatggcctcgtacatggtggcaccgctgtgcaggtcgttgatgatgaactgccgcagcgcctcctccttctcggtaatgatgcacacccggcgcttgatgctgttatcgaagatgaaatgatccagcacaatgccgttgaagtaggtgccaagaatgctcagaacaacggtctttttatcgtagacaagagcggcagagagtgccacacacatgcccgaaagggacatggccttgcccagctccatgtgcaggtacttgttcatgatctttgccacgatatccagcccgccggaggatgcgttgcggttgaacaggatgctcagacccacgctgaccaccagaatatagcacagcacatccagttcctgactatcggtcatggagccaaaatccgggaacaaacgctcaaaaagccccagaaacaccggcagcatcacgctggtatacacggtttttgcgccaaactccctgccgcaggtgaaaaacccgatgatgagcagcacgatattcagcaccatagtaatagccgaaagcggcagcggtacaaaattagaaagcacgatgccaaggccggaaatactgctgacggatgtatggctgggaaccagaaaaaaatagaccgccgctgcaataatggcgaccgccacggtcaggatggccatctccttggcaattgcagggtagttcagcttcttgtttgtcattgttgctcctccaagcttttgttttcagcattcagtataccatgctttgcgcttgcaggaaagcaccgggcgcaaaataacaaggccgccgcacaaaacgctgtgcagcggccttgccaccttatcaaaattcgtcttccgggtcgccgcgctccggcatggtgcgcatctcccgcaccagcatggcacgcagatgatacttgcgctgctcctgctcggtctccgaactggtgcgcagctccaccgtaccgtcagggcggctttcgcccgtgtacagcggaatgcgcaccacagcctgtgtgcctttttcgggcgcaggctccagctgtaagctccagtccatccggcggcagcactcccggcagagcagcagtcccagctgcgccccgcccagaaagctgcggcggttttccagtgctgcctgtacatcctcaccgggcagaccgcagccatcgtcggtgacggtcagctgccagccgctctcggtgcggcgcagcgcaatgcagacgctgccgccctcccggctggcgtgcaatgcattggagagcagatgcaggcacagcagctccgcatctctgcggtctgccattacgcagcaggcagtacacccgccgtagtccagccggatatccaccccaagctgcgcccggatcatatcagactgcgccgccacctgctgcaaaagctcacacaggtcaatggggtacagctgcggctttgtgtcctcgcgcagaaactccagcagggtgatcgcctcggtgagggtgcggtccagctgtatggcagcggtgtcgatatctgccaccgcctgccgggtagactcgtctgcaccggtgcggtcaaaatgctgctccagatattcacagttgcgtccgatcagcgccagcgaacggaagcagacctcctcgacccgcttgcgctgctctgcggtgatagaccgcgtttctgtcttttgctgctccattgctctgcctccccgggcgatgccatttttctaaaggaacgccgccgtgttccaaagccgtgtgcaagccttacaggcgggtggatggcactttttgccgcaacacaacgtccctgaccgcgtagatcagcttgccagtggtaggtttgccgctgcccagccttgtatcggccttaaacgccagccacgcaagaggcggcttttcctccagctgatccaccatccggcggatgccgctttccacagcagcgaccgatgtatcaaactgctcgctcaccgcctgcaagatttccttgcggatcgccagcttctggctggtgctgcatgcgatgccgaccgcgcaggatagatatccggcgttgacatccccctgcgggatgccccacgccgcatacagctggctgcaccgctgctccagctgccggttctgccgcccgggcatccggtaaagctgccacagcagccttttcagctcagtgccctctacgcagtagcacccctcgcggagcttttgcaacgccgtgccgctgctgcggccatggctctgtatcagaagcatcggccgctccttcagctgataaaactgccggacaaattgctccgcaggcagatccgtcagctcgctgcaaagcaccacggcatcataacggacaccctgccgcagctgtgccagcagcttttcgccgctgcaaaagcaggtgcagtcaatggcggttccctgctcctgcaaataacgcttctggacacgcagttctttcagatcatagcttgcaagggcgacttgcagttgggctgttcgctcactgttcacgccatgcgccgcctttctcgcctaccagcccggcagctgtcaggtctgtgaccgcatcccgccagagctccggctgaactccattttcacacaagtagcgcaggagccggtaacagaactccggcgctgccgcaacatgctgactgacgatctgctgtcggctgccgatctggcacagggtcagccgacagccttgtgtgccctctacctccatggcatacaccagcgtatacgcctgctgcaaaccatcaatggcagaatactgccggatcataggtgaaaatgtacgttccatttcagttcctccttactacaagggccaaattttttctgccttgtttatccttttattattgtataattgtataaagcaggagaaactgttacaatcctaaagaagtgttgttccgacagcctttcaggtaatataacgccgttttttccggcgcagcctgtctgccagctttagaatatcacgttcagcctgtaaattcaaccggtatctttttccgcttttcttttttgccccgtcctttcggcaaaaccgctgcccgggcgcaaaagtgccgcagcttcagcattcctacggaataatttcacggtttcttcatttttatttgctaaactaaattagatattgtctgcaaatgtttcctacttttaaaccacaggcagcagcgcccggcggcgcagtaccggaaaggcacatctatgctcaagctcaaacagatcaacaaagaatataagaccggcgagctggtgcagcacgcactgaacaacgtcagtctgaacctgcgggacaacgaatttgtggccattcttggccccagcggctccggcaagaccaccctgctgaacatcatcggcggtctggatcgctacgacagcggcgatctggtcatcaacggcatctccacaaaaaaatacacagaccgcgactgggactcctaccggaaccacaccatcggctttgtgttccagagctataacctgatcccccaccagaccgtgctgggcaacgtagagctagcactgaccatctcaggcgtttccaaggccgagcgccgccgccgtgccgccgctgcgctggagcaggtggggctgggcaaccagctgcacaagcaccccggcgagatgtccggcgggcagatgcagcgcgtggccattgcccgcgcactggtgaacaaccccgacatcctgctggccgatgagcccaccggcgcactggacagcgagaccagcattcaggtcatggagctgttaaaagaagtggcgcgggaccgtctggtggtcatggtcacccacaacccggagctggccgagcgctacgccacccgcatcgtaaagctgaaggacggcgtgatccgctccgacaccatgccctacgaacccgaggacgaggctgctgccgttgcccccgtgcaccggaacatggggcactcctccatgtccctgctcacctccctttccctcagtttcaacaatctgctcaccaaaaaggcacgcaccctgctcaccgcctttgccggttccatcggtatcatcggcattgcgctgatcctttccctttccaacggtgtgagccgctatatcagcaacatggaaaaatccacgctggccgcctacccgctgcagatcagcagcaccggcgtagatctggccagcatgatggatccggacacctacaccagcgtctcgtccggctcctcctccgcgccggagggcatggtcacggtgagacagctgctgtctcaactgaacatcggcgctgccagcaacgatctgcgctcgctgaaggcatatctggacagtgacgcctgtaccatccgggacaacgccacggtggaatacacctacacccctgatccgctgatctaccgccagaacccggacggcaccgtgcagaagctgaacccggacaccaccttttccgatatcgccagtgagaacacctcggtgaccagccttatgacctccatggccagcccctatgtgttctgcgaaatggccgagacccccgccctgtacgaggatcagtacgatgtcaaggccggccgctggccggaaaagtacaacgagctggtgctgaccctgaacgcggacggcagcgtttcggactatgcgctgtacgccatgggtctgcgggatcaggccgagctggacaagatcttacagcagtatgcgcagaaccagaagatcgatctgcccacggactacggcacctatacctatgacgattttctgggcatgaccttcaagcttgtcaacaaggccgactgctatgtctacgacactgagcacaatatctggctgagcaagctgaatgatgaagcttacatgcagcagctggtggccgacagcgaggagctgaccattgtcggcatcgtgcagcccaaggcagacgccacctccactatcctgcacagcggtctggactacctgcacgacctgacttattacgtcattgatcaggcggccaacagcgaaatcgtgcgccagcagctggcagacccggacatcaacgtgctgaccggcgagcccttcgatgctgccggcaacagcatgctggatatcgcctctctgttctcggtggacacggacgccctcaaggacgctttccagttcgacaccagcgccctgcactttgatctggacggcgcattcgacctgaccgacgattccttcgatcttgccaccctcatcgacccttccagcttcaagctggacctcagcgggctgccgctgccggacatggagatggacatgagcgagctgttcgacggcgtagagctgaatatctctcaggacggtttacagacgctgatgaaaaagatcatgaacggctacaagcgctatctcatcagcaacggcctgctgaatctggataagatcggtttttcctcctatatgcagaccgaagccttccagacgctgcttgccgaatccatgggtgacctgctggacacctccgggctggaggagcagtttgccggtaccctccagcaaaatctgcagaccgtgatggagacctactccgtccagctgggcgaggcgctgcagacccagctcaccgccgctttgcaggagcagatgggtcccgccatccagaagctggccgggcagctggagcagaagatcgcgcaggccatccagagcaatattgcgcagctgagcacgcaggtggaaagcgcactcaagatcgaccccgctgtgttccagcaggccattcagatcaacatgaccggctccgacctgaccgaaatgatcaaaagcaccctgctctcctccgcttccagctacgaaaagattttggacgacctcggctatgtggactacgcaaagcccgatgccatctatatctaccccaacagctttgacaccaaggcgcaggtggtgaacgagctggacgcctacaacgcctccatgcggcagcagggcgaagaggataaggtgatccactataccgatatggtgggcactctgatgaactcggtcaccgaaatcgtgggcatggtcagcaatgtgctggtggcctttgtggctatctcgctggtggtgtcctccatcatgatcggcgtcatcacctatatcagcgtgctggagcgccgcaaggagatcggcattctgcgcgccatcggtgcctccaagcacaacgtctcgcaggtgttcaacgccgagacctttatcatcggcctgtgttccggcgtgatgggcgtggtgctctgcctgctgctgctcatccccggcaatatgctcatccaccacatcgcgggcgatgtgaacgtggtggcctcgctgccgccgcaggccgcgctgatcctgattgttctggccaccctgcttaccatgctgggcggcctgatccccgcccgcagcgccgcaaagagcaaccctgtcaaagcgctgcgctctgagtaacacattccgcattcaaatccctgctgtgctctgtgtgcagcagggattttgcattccggcccggcttgtgctacaatagaaaaaacttcatttcaaaggagtctttccatgcctgtcattcatgagatcaccgaccttaccgccccggagctggacatctacgcccgtctcacgcaggcgcagctgcgcaaccgactggagccggaaaagggcatctttatcgccgaaagccccaaggtgatcgcccgggcgctggacgccggttaccagcctctttccctactgatggagcgcaagcagatcaccggcccggcacaggagattttgacccgctgcggcgatgtgccggtatataccgctgaccgggagctgctggcacagcttaccggctttgcgctgacccggggcgtgctgtgcgccttccgccgtcctgcgccccgcacggtggagcaggtttgcgcccacgcccgccgggtggccgtgctggagggcatcgtagattccaccaacgtgggtgccatcttccgcagcgctgccgcgctgaacatggacgccgtactcattaccccctcctgctgcgacccgctgtgccgccgcgcggtgcgggtaagcatgggcaccgtgtttcaggtgccgtgggcgcagatcggcacctgccctgccgactggccggaaaacggcagtgcccagctccacgcgctgggcttcaagaccgctgccatggcactgagcgaccgctcagtcagcatcgatgaccccgcccttgccgccgagccgaaacttgccatcgtgctgggcaccgagggcgatgggctggccaatagtaccatcgccgcctgcgattacaccgtaaagattcctatgtcccatggggtagattccctcaacgtagccgccgccagcgccgtagctttctggcagcttggccgcttataagtcccctgctcacgctctccgaaattgcttgacaaacgccccaaaacgcggtacactatcagcgtcatcatcatgggcctatagctcagctgggagcccatgcggtccttaaacaatctggagttatataccacgcgcccccaagcggtttttgggggcttaaatatgggctcgtagctcagttgggagcccatgcggtccttaaacaatctggagttatataccacgcgcccccaagcggtttttgggggcttaaatatgggctcgtagctcagttgggagagcgttcggttcgcatccgaaaggtcgagggttcgactcccttcgagtccataaaacgccgtatcgtgttaaacgatacggcgtttctttttgccgttctttgcaaaatcgtgcatcattcgtcttgacagcgcaaagtgacgtgtgccgaacttttcggcataatgttcatagcttcaccagaagttttgtcaaaaacgacgattcccccattcggagtacccagccccctaacgggtgcttgtttaaggtccgttttccgcccactcggagtacgcaccgagagtgaatgactcttaaattcttcaaactcctccagtggaacattgaggatgatctcaatatcataatcccgtccaacacggacttccttgatgaactggttgaggattgcctgccgctgctgaaaggatgcgttctgataggtgcttgcccaagtgaacagattgctgcaatcattttcagctttcttgttttcctgctcaatctcctccagcttgttctgtgcagcggtcagggcgtcctgtgctgcttggatcgcagcttgattttcatccagaagctgctggatcatatcacggtcaatgctgctctttccccggatgacgcgaatcatttcatccttcaatgcattccgttcgtcatccttgaggtcgagttcactctttgcgcgtgatacttctttctgcgctacttccatgtccttgcgaagcatatcctgaagcagcttgcttttggaacactctaaaatctccgaaaacttggtgcatacgatactctctacgattgcgtccagttttgttacaccgtagccggactgtccatcgcattgacccggatgccgtacattataatggcagctataacggaaccgcttttccttcaccgtggagccatccgcacgcagtctggtgcgtccgctgctcgtgatgttcaggcgatttccgcagtgtgcacagaacaccttcccacaaagcagagcatgaggactgtaactatcagagtcttcgcccttctctctgcgacgagcatcccgcagctcctgagccttttcaaatacttccggctcgatgatcctcaattccgggcattccttttcgacgttgccgttgatgaggtagcccagataggttttatttcgcaccatccgaaccagcgtcgtggtcgggatgttcttgccgttccgtcccatgatgttgttctctacaaggtagttgcagattcgctttacaccgtagccttcataaacgtatttctggaatatcagacggacgatttctgcttcttcctcgttgatttccagctcacagacttcctgatttttcttgttcacgcgacccttttttacacgcttgtatccgaaagcaaccgttccaccggtatagtgaccttcctctgtaagctgttctatacgggtgcgagtacggatagaagttttgatactttcgccggatgcctgccagtagcggatgtagttcatcagcttatcgacatgggaatcaaaccgctgctgaccttcatttacgctccagacctcgaccccttgcttcgtgaaccattccacgataaagggcgtttcgtcgtcacgccgacccagacggtcaaacatgaacaccagcagaacatcaaactctccggcagcagcagcctgctgaagcagctggagctgatcgcggtcttttgcagatttcttaaaaccggaaacgcctttttcggaaaactccttgacgatttcccagccctgccgttctgcaaattcgtggcaggcttctttttgcatgggtatgtcatccttttcgacctgtccaatggtcgaaacgcggtataaggtatatacacgttttttcatcgttgtcactcctatgtaaaactaaaacaacgatactgtgcgcacactcgtttgtttgaattggttgctgcatcaactgtaccattattttagtgctggactatccttgttgcaaggatgtcgattcaattgtaattcttggcttcttcgcggagggtatcatgaatcagtttctgaagaacctccatgctgtcaccatcttctgcataagtgattttcactttgcagccattaacgatatacgaatcctgcgacacaggaatcacattcatattggtcatatctagcccttctttcaaaagtagcgatagcgcgatataattatgtaataagaggcacccacagcttgcaggtgcctcttggcataggaaatatgttttagaacttcatcggcaaggcgtccttgcggcctttgccgttgtaagccatgtagatgggaaaaacgtatttcttccatccgggcagctttgcagggttatccctgccaacacggtaaatctccatgggatggacgctgccaagcgcacgaaccagccgttcctcgctgaactcgccgtgatacaactccacaaagtgcatcatgccacgcaggacagatgcacggaatgaatcgggcttgccatcccacgcagccacgattatccgcagggattcgcagtagatcttttcgcccatctcgttatacagcttgagcgcggtgcccacgcagctgatgcggtagtcgctcaactgcaaactgtcatagttgaatgccagccccacccggttggtagcagcgagaaattctttggaaggagcatcatcgcctgcaacctttgctcgcagcttgatgcccgcagacaaaggggcagaatgaccgttctgctcggcaaagagcagggcttcctgctgcatggtcataccggtgtagaccttgcagagaatcggcaaggctctgccgccgttacgaaggatgcgcgcttcgatggtgtgctggccatccaccacataatacttgccgttgcggaagctgatcttcggctcattcgcaacgtattcgttgaagtcagcagcaatcagttccacccgcttgcgctgcacaccccgctggtagatttcacgggggtagatcagcttactgctgtgaatcaccctcatttggtaaggcggggtgatattgaaggaagctgcaaaattttcagtgtcattcttcaggcgcatctgatttcctccttaattcgccaaatgtatttttcagcttcggtcaaaatctcagtcacttgcttcttacgcttcgggctggtgagcaagctgggattaaaggtgaagctgtattcaagccgctggatcattgcgtgaacagcggattgcagttcggtgtataacatcatttcttcgactgttcctgcatcctcaaaatcggatttgataggagtgtagggatagacaggcggcttaccgtcaactacttctggcggtgcgtaagccgccgtagagcggatgatcggtttgagtttttggatacttcccatcgggttcagcgcaaggctgattttcacagcatcatcgacccgccccatctcttctggggtgaggtgtccgacaaatcttttgacacggcttttgtcgatggtgaagatttgctcagcctgaacgatggacggctccagcccctccggttccaccagacaatgcgtcggctgcgtagctttcttttctgtcttacttgtcaaagtcgcaacgatcaatgtcggtgaacaggagtttcccacatcgttttgtaagatgaccgctggacgggttccactttgttcggaacccgtgcggttgtcaagtcgaacgaagtagatgtctccgcgttggaatttcaaagtagattccaaattgcgaaacctccgtttggatatgtaagaaacccactgcacctcctaggcagcgggtttctgttgaagtatgggagcaattctttttatacgatacacatcatctccttcgatgactgagataaagcaccggtatcaacggtgcattacaacataatcgtaaccatgccgggtctgacagacagtgcaagtgtccatgctgttgtctgcactcggcacgatagcaattttgaaagccttggcttctacgaaatgtcgcagacaggttgcacagagggttcggatggacttgatcatttccggggtccgttccatctcctcataaatttcctgttcgcgcaccgtaggattcaactcgtccatttgagtagtcctccgtgttagtaaaggtgattagcggataaatatgtaaaagaacaggagtgaccggagaccgaaaacagcatccggtcactcctgatagaatatgttaaggtctcgcatattcgccctcggctccctgcgagtggggaatcgttcggcagcggacttgtaccgcttcattggcatttcagccaccccgcctacattctgaccgggccgcgaattacggaagtatcattatcgaagtaccaaacaactgaactcttcaattttcaaggttcgtgagtgtggacgtttcgccagcggagagagccacttttgaaattgtcccctcactaggtagccgacgaaaatggtcatttcgcaccctcaaaatcgaagttcttcaaaaatttagtgattcgtgcaattcgcttactaatgttttggtgagcaattcgatagactttcgataattcaacaacactatatccttcgtatgcgtacaacgtgataatttccaaatcctcttttttcagatgttcaagtgcagtaagtagacgttcgtcctcgatttccccaatccatgcaaagctgcttttggtttcgtgatatgtatccactatggttgttgcttccatatatttctgcattagaggtgatgtttcatcctcactgcattcaaacgatgaatttgaaagttcctgcgttcgctcaatgcaggtacgttcggaattgaactgctggcggtcatagtcgtacatcttctggatggcatcttccgtcattcccgcagccgcgtactcaatgcgcagcttttcccagtgtgcttcaaacttcttcaactcatagcccttattaaaagacatcgtaaacctccaaattttcgataaagcgtgaaaagtcgaaaattcggagttgctagggataccgtgcggccagttccagccacgaaaaatgggcaaaaagaaacatgaagtgtcctttccgccggatgcggaggttgaggacacttcactgtgtgacagcttgcgggcttttcttggcaacaaaaaagagatgcactaaagaaaagggtaccgacactgttttccatccgagaatggaaagcggtataagtatcctcggcctttaatgcatctcaggcttcgatatgtttttgatccgacgcatcgaagcctataaaaaagaaaaccgccgtgcgatcagcttacagggcatcgattcgtgccctgtaagcatatcacacgacggtgttatgaaagtcatctggcggtgttatgaaagtgttatggagccattttgcccctttctgaaaaattttaggtgttatgaaagtcacatgaaggtgttacgaaagtgttataggaattattctcaccaattaactccaaatgcaagggtttcttcgtattcttccgtggtcagatgttcctttgctgcagccaactcattggtggcaagttcattcattccctgcgctttcagggagcggatcagccagcagtatgctttcggattatccggagcgatggtcagagacttcatggcgtactgattgagcaggtcataagaatgcagcgaatccagctgcttcagcagttcactgacagcactcatataggaaagatggtattttgtggcaaactggatgagccaatgttctccgtctgcggaggacaagatctttccatggtaaaggtcaagagcatttttgaggatgtccactttgttgattacggaggacgctctgacagcggaagatacaagttcatcaaaacgctgataatccgtcataatatggagttccgggttgagctggtatccggatgcggaggataaaaccaatggctcatccgaaatgatactgaacttctggcgtaaacggtaaaccagccccttgacgtttttgacaggcttgtctgaatcatccggccagagtgtttgggtgatctcctgtggagaaatagcatttttgcgggagatcagaagatacgaaatcagtcggctgattctcggagaattaaaatcggcttctttcagaacgcctttggatgtactgatgctcagctcgccaaacagactcacatagatgtccttgctgttttgaatggaagtgggaatgtttgccatctggagccgattcagcattttttgttcgttgtacgatgcaagcagcacataggccagaatccgcagcatactggtctgctggatatatcgtttgggattgcggacggcaagcagagcgaccgggcgcggttccagagaaacggcaatgacagaccggatgccaagccgctgatatagattgtactctgcaggataagcttcttttgtcacctcggcatccagaacgaccatcggaatccccttacggacagcctgtacccaccgatccagaaattcagcagattcatattcttcggtcaaaagcgtcgttttatccgttgcacctgtgttgaaccaccagaaaggtgtccacaggctcaaatccagatcgacctgaatcagaccgcaccagtccgcatcgtagaattgacaggtggctctcagcacctgcttggcaacttcctttggggaaagacgccggtaatacaattgcgcttcaagatcattcatactgttctcaaaatcaattgcacgttgaatatctccaaaactccgttcttcgtactcatgatcagactgccgcataaaatttcacctcgtgtcaaataaaaaagcacagcatcagggattcactcgctctgtacggtgaatcccaatgctgtgctggtatcaatcatgcaaccgcaagagctgaacaaagctacatcgtagtatggttgggcggctcaagcaaaaatgaatctcatttcgtcaaaaatcaaccagaaaattattaaaggagtcattcaaatgaaacgaaatcagaatttcgaccataatcactctcaaaaagtgctttcctgccgctacaacatggacaccaaccgggtggaagcccggttcggggatggcactacccttgccattgactgcatcgctattgagggcaaatacggcaatacctctgcacagcgagcagaactggactggttattatataataagcctttggagtacgcccagcttgtgctgggtggtgaaatcgagcattacctctcacttggctgcaatcacggcagactggaagactaacctttaattaaaatatccaaagcaaaatagcagccctctacttgcagtcgttgcaaatagagggctgttggcttattttaggttttctaatagtgtatttaaaaacaatccgatattaagcattataatcgcaagcaaaatctgtgcatacaattgatattttgggctttcctgtttatctgaacttttaagtgccgcaataagcatttttggaaatagaaacccgcaaacaactattacgataatggcaaaatatcccatcgcacgctccttgattattacacgttaggtgccacttcgaaatcttgactattataccagaaggttgcatgtccttctgcgataatagttgtacgaggctgagggatgaaagaaatgctcatcccaattttatcaaaatcgagtgagacttcccaatcaaaagttgccttaacggtcgtgtgagcataagcaacgtaaatttggacagtatcaatgttgttggaatctgattgagtacttatattgataataccacttatatgttttccatatgtggaagtatcagcatgatttaagagcggtgctgtgcaaataacgactccgtttttactggtgtctatattgacatcactatataacaatgcactatcttcagttgcagagtaaaagtaagctatttcaccagttacatcatcaactttagtgacaacttcaatagagttttcgtttgcagcaatccatccaatgccaaagctatccgtatacgctaatataggacgctccgaccatttaatatcatatgcaatcgtaaccgctcttgtaccttcatttcccgcaagaccataaaggaaacggacagttgcattagatctcatagcaccagtggtttcatccggtgtatacaagtagtcaaaagcatcttcagactcgttgtattcctttatgatatcaatttgggactcactatatcctctcgattgcaaatccgttacagcttgctgcttgagagacagcagctgttcattaagatctgcacgagttagttcaccactcataagcattgcttcaattgcttctttttctgttccgactgcttcctgaacagcgtccatatcgtcaatcgaaactaactctttttttccatcagtcgcatatgcggtaggtgatggaagaatttgaaacacggaagtcgccatgctaatgccgatgattttcaaaaattctttacgcgctatttttttcatagatagtccttcctgcagctgattaactattatatctagtttttaaaaagctcgactgattgaatcctgcaccggaatcaccctttcatattttaagaattaaaaatagaaacaataatacagatatcgactataagctatatttttatccgttggaaattgttacatctgtctcaattttcagattaatcattgatagaatcaaatcacaagaatcaatcgctgtccataattttgtaacaacagagagaaaacttgtaacgaaatcggtgtagctgcaaataatatgaccctcaacactgggcatccagtattgagggtcatatctaaataatctttttgtaccagcactttattgaaaatcagtcgttaaccgaaggcttttattatgtcatgaagaatttccatctgctgcggcgaaagatcatttcctttttgacttggtgaaagcagttcattacggagtttaattaaagttttcttttgcgcaccagtcaatccagaaagagatagtacttctggcgcatccagtcctagaagttcatctgttgaaatgttaaataaggatgaaatgcttgcaagcacatccaacggaattgcatgcgcatcactctcatatccactaaccgtggatacagccttatttaaccgtttagccaaatccgcctgcgtccagccacgactttctctcagcttttttagcttttctcctaaataatgctccattcccgtacactcctatcctatataaagtgtactatttgaaatttcaacataatcgtactatactacatataatgttcgattatattgaaatttgattgacttgtgaggagcagggctgtatgttgtgtgataaaaagcattcccatgtgcaatggagggatttcaaaatgaatgtcttggtttgtgatgatgaccagcagatcgttgattctattattgaagaactcaaaaagaaaagcgaggaaacgcatgtatcatcaagattttatggtttttctcaaccaagtcaaatagacttatcacttccgtatgatattgcgcttctggatattgatatgggcgaaacaaatgggattgagcttgccagaaagttacgagcagaaaatgaaaacattgtgattatcttcattacaaatttcattcagtatgctccagagggatttgaggttcaagcctttcgatacttactaaaagcagatttctctgctaaacttgattcctactttgattcagccgtccaagaagtgcttcaacggaaacagcttgttacaatttcgataaactctgaaattatcgatgtacctgtaaatgacattctgtatttagaatctcatcgaagaatcattgttatgcacttgttggacgaaaaacgcccagcataccaattttacggcaacataacggaactatccgaaaaaatcgagccactcggtttccttcgtattcaaaaaagctatcttgtcaatatgcactatgccgaaatctttcaatacaataaagtccaattgcgcggtggtctttgtctggctccaagcgaaaagaattatagtgagctaaaacagaaatatttacattggcgaggtaaaagtagatggatgctttaatcagtttggtttacacaatcatagattcagtctgcgtatgtctgtttttagacgcttttgcttcgcaccgttggagggatcatagatttcttgtcggtgtaatagttcaaaccattttaatgtatgcgtccattgaattcaatgctgctttcttaaaccgaaatcaaattatcaagattcttttgattttgctatcctgctttattgctgccagagccctatataaaaacattacaggaaagtttttgctgtttcttatcattatagaatatcttttaacatacagtttgtcttttgctgctggaatgcttgcaactgcagtttgtgggatggatgctcagacgtttcaagctgacaagacgctatctctaatctatggaatctcttattattctgccgaattatttattattgcactgtttcgcaaaataatgcttcagcgcatgacaagcagaccaagaagccatgctcaacattcgcagctgattctttactttctatttccatgcgcatcgtttgtaatgcttgtgattctactttacgttacaagcggacacaatatagaagaatttgtttctgctggctgttgcattctcatttttatttcaaacatcgcaatcctctttttattggagcgaatggaatatgccgcatcggaaagagaacagctattgacacttaatcagcagattcagctgcaatcgaaaagcatggcctcggcaagcgaactttattccgctcaaaggaaaaaggttcatgattttcgggcccacctgaatattctaaatcaactgatgaaaagccaagagtattctgctgctgaagagtatcttggaaaaatcaccgaacagcaatcagatcgactatttcttgttaacacgcaccatcctatcttggatgcgcttttcaacacaaaagctgccgaagcaactcaaaagaagatcagcattgattttgaagtgaatgatttatcaaatctcccatttgatgcctccgatatggtagtgcttctatcaaaccttttggataatgccattgaagcgtgtcagcggtatgacaagggcgataaagcgattcatgttatggcagttgttcagcaagacttttttatctctgtccgaaacacatcggaacctgttgtaattataaatggtttcattccaactacaaaaccagaaccacagctgcatggttttggacttgcgaacatccgactgattcttgaaaaatacagtggagagtatacgatgttctatgaaaatgggtggttccagttcaccgctgatataccgctcactccgatttcgtgacaaaagaagtccatttcgttacattattgtggaaattgcggctcaacttgtgtattctttgtttcaagaaagttcttttaatgaggattgtcgcaatgaaagattttgcaaggcaattaacacaaaaatgcgtgtcgatgggattgcttgatgaatcttattctgaatggtttgcatatagcatcgaaaaaagagtgacaaccttattaacttggcttgtgcagtgtctgattggcggtttttgctttggttggactttaacaatctcattttctgttttcttccttttaattcggaaatacacaaacggttatcatgctgccacttatagtaaatgcctgttccattccattttattagaagtcgttcttcttgcttcaatctcctacgttttccatacaggtctggcgttgcttttcttaactatagtttcagatgctacaattttgtgtattgcaccagttaacaatgaaagcattcactggtcaacagatgagttcaaggctgcaaagacatctgttcgttggttattattgcttctaaatattttcgcaattctgttggcgagagttcaaatcgcaccctccatactacaagggttggtcgcagcattaactgctgatgcaataacactatccatttcacgctgtcaaaattgaaaggagggcatacaaatgaaaattcaaatcaaacagttcgccaaaaagaaaattgaagctctggtgaagagggatatgcaggagtggcctccggtttgtgcgggctggatgtatcagccgaaacgtccctgtgtacctgagaagcatctgcaagaaaaacgaaaataagtttaatcctgagatggcatggttgctttcctgtttcaacaacaaaaagcactatgccatttttctttgttggtgactccgatttcgttacgaattttctccatcttattacagaaacgtagacaatattgcttgctacgtatacagtgtaagaaaggattgcttattaactcagcaacaaaaattacgagccaaactctaagaattggtcaaactggatggacgagtaacggatatcgagagcagaccaaggattttgacattcctgcatctcagaaagactggacaaaataccctgattcctcttgggctggtgttctggtagatgcaacaaatcgcgttggctgctactatgttgtcaatattgctgcaaagaccggaaagacttggtatgttgaaatttcaaataatatccgataaccgtttttgagcaaggagttttttatgctaccgttttttaatcaaaaagagttggtggtttgctcaaatcaatctcaataccaaaaatgcacatctcttttagaaaaagaaggaatcggatatcgaacaaaagtacgcgatttatcatcgccgtctttgttttcgatgggaacccgtgaaagaactggaaccacatttcaaaaggtcaattgtcaaacaatctacacaatatacgttcgcaaagttgattacgaacgtgctgttcacgttatcattgtttgattaaaccgccaaaaccatatacgcttttcctcgccaaacaatcggttgcaagcagggcttttgtctatacaaatgccatttttgcttcgcaaaatgcttgttgggctgtgcccaatccccttcattctgcaccgttccgatgcaggctgcgcgttttttcaaaacgcttctatggtgttgtacaataaaagttgacatagccactcattaattaaacgatttcaaataaaagtaggtgctaccaatgcagatatgaaaatcacagataatggtttttctagtcatggaagataatttgaaggagacaaaaaatgaaagacctcaatagacgcacttttatgaaatgcatggcagccgcagcgactactgtagttgtaggtcaaaatgtttcatcggcttttgcactagacggttccattattagacgattggattctgctgatggtgcctatgctgaacagctagcatttgaaatcactagcgatttcaaaaaatctccaaagaacttcctttcacagatgtctggattcagaaagagcgacataaaccaaatcaccgggcttctgttctatggatactcctatgagaatatcaatgacttatgggtgattttaagtgacctcggtgaaacaagctcgaatctggaagtaaaaactttgtcacaatcaatgtctaagagcttaatgctttatgttgaatcccaaaaacagattatattatcttcacatccaagttccaccaataagagtatcggtatacagccccgatcgagcacatggaaaatcagtgttgttttaccaacaaatcggaactataaagggacattagaaatttattcatcttcaggttcaagagtgttatcctgtgcttgtttaggcttagcagcagggaacggttcaatgtcccagtataaaggaaacacgccgacaggtacttatgatgcatggcttgccgggccacattcaaacacgacttcttatggaccatataaatatgtcgcaacaactccaaaaagcggtgtggtttttgattcgaacagatcgggaatttggattcatggtggcgatccggctcctacatcgagcaaaggcttgccgaggtatccactaagacctacatatggatgcgttcgcgtcaccaatggtgatcaattagtgattcagaacgttctcaataatcaaagtcaaaaaacgggagtgcttgaaattatcgagagagatacctaagatatgatgctggaggagcgagatgaaaaggtttcaaattctaatcctcgcaatcatgctggccagtttatctgcctgcgcaacaaattcgctaccgtcatcctccaccgaatcctctgtttccatatcggtatcaaatccacaagattttttatcagaacttgaggatatggaaacgagtcaaatattagaagaacttaaaatttcagatggcggatataccgaagattgtttttcggtattgtctaagcggcttgttgaatttccagaagatacgctttgtatactgaagcataataagttgatggctgatacggattttgaagcgcttgtcataactggaattggagcagaacttccctatgttgggtcagatgaagaaaagaaggcacttcatgagtatttgaagtctgcatccacaagcgaagaatatgctgaaatatcatcgaaaattttagatgcatggacatctgaaagtaatgctttctaattttataaaatagaaagggtggttccagtgcagtagcaaattatttccgtgaagaaaaatattaagagaaagagacggcgaatgttatcgaattcgatacggatgtgcagacgcaaaaaagtaatggaggacactttatgaataacgagattggccgccgggattttatgaagttgagtgcagcaagtattatgacggcaagtgtagcactaaattttggaaatactgcctttgctgcaacagcttccgagaatcctaaagatgttctgaaaaattttttcgaatcgttctctccaacagaccatgaatcttgggtaaattatttcgcaagttcagtgtatggatactatcgccaatttgcgcagaatgcgtttaaccaagctaaaagattagggcttttagatattaacaaggccgaacttctttatgctgaaaaagtaaacaatgtctatgctccgaagtattatgaatttaaccagtactatgattctggaacaaattatgcctgctataagacgattacagatatggaaaccgaaacgggcgaatacttcgggaatggtacaaactttagtcttgtactgatgattcgagaagcgagtggttggaaaatcggaggtatttgtaaatgtccacgtgacctcggaagtgttccggccggtattacggtatcgaggcaaagctatggatttgtctcttatcaaagtcaaccaagttacattaaggtaaaagatgagaatggaacggtcaaaaatgttgcattttcaacttatctgaaaaatgttacctacaatgaaattggaaatatgggatactacgatgaggcaatcaaggctaatgttatggccatcaagatgtgtggttggtgggcacatgccgctgggtatcgttctgctgaaggttgcgatataaagtatggcgatgttgcatataaaagcagttatcaaactaaaccggcaattacaaatgcaatcaatgctgtcgatggaaaaaaacttgtgagttctggcggacaactgttttttacgtcttactttgcaggaagttctgatacggctggtaaaaattctgggcgactgcgtcagaatggctcgaattatcttgcaagtacaaagtcgtatacatatacagagattcttcattattactatgataattcatcctacaataatccgtccgttggcattgtcaaaatcaattgattgctagtttcttttttataaagaaatagcaaaaagtttttctaaggtaagaatatgaaaaataaaaaagcgttttggatgatgctcactggcgttgtaatactttttggagttttcctttttttgaaagataaaaaaattccaagccatgaaattgaattcgccgcacaagaatctggacaatccagcggtatgatttcgattacactcccacaaggatgggaatttcaggagaaaacaaaaaagtcagacaccgaacatgagccgctcatgcttgctggattgaatccgctgtacaccgtgtatgacatttatgatagtgatcacacacttatcggtgcaattggttacagcaattatgaaccatacgagggagataaagattccgtgcaggtcgtatattctgcacttcggcttgggtcggtctacagatttgatacagacagcaggtatgatgtggttaaaacaaacaaatatggaacgactgcacttacaacagtagtttatcaggatggtgcaaacgctgagcctgtgaacaactggggcatcctctcttataacaacgagaaagaatgctttgttgccgttgaacttgaatcgaattccgtgtcggaaagccaagtgttagaaatagcaaaatccattgagttttagattgcgttttgaaccacaagaacttgatagcaacatcaaataatccaagataacagctgatctgcctgctgtgtggggcatggcattatttggtcaccaaaagctaacgcggccgtccactgtatttcaatacagaaacggacgaccgcgttagctttttttacgagatgaggtctcttttttttcttaagtcacctaaccgcactaccctgcatcacaggcattgacgatgatatccacgtcggagcggttcatcaggtctttcaggatgccaaactgctttttggtaccagcagacaccagattttcattatctatctttttgtattaaggtctacagcaatctaatcccacattaaaacgagaaaatgcttaattgttctcctcaaagttctctacctgttccatgacctttttgagaacttcggggctgtactgcgggggatatcacgcttttcaaagaacgagccggagttgcgcgcagcgcgcagataaacccggcagttaaacaaaatctgatcaaggttgagggctttttcttcagccttcgtctttgccatggcgtttttctccaatctgaaaattacaaattgcggacaaaaaggacgcattgttgtggcaagcaatgccgtcgtatatacaacggcgacttttgcgttgcaaaatgcttgttggggagtaccccaaacccctttgttctgcattttccaatgcaggctacgcctccctgcgggatgcttttgaggatgtcaatcggcacatctcacgaaaaatccggttcctttttggcgtaagggtcaatagaagaatttgatggttcatggtacaatagcagacgttgcgtgttgtgcggtttgcacacgaacatagtgaaaaggagctgttgaacgtggatacgatccatctactgcccggtgaggaacgctgcgttgattttcgagatgccaatggagtcccgaaggtacactacacttactgctctatccgtggcaaacttttcaactgcacctgctgcacaaaggccgaagctcagcggctgtgtgaagattggcttgtaaaacaggaccgctgctacataaactaaaaaatgccgccgaggatacctcccaactgggaaagctcctcggcggtattcgtttatcgggtctgcgctttttcgatggtgtccttttcctccgcaaaaaatcgttctacgtttttctgagcccgaaccagttcttgcatctcgttccgtgccttgcggtagtccgggtaagcggctttcttcttggtcagtagttctgcaaactccgcatccaactccttgaccttcggcagcttctgcagcccggcttcgtcaaaagcagctttcgccgccttgtgcagagtgatttcctcccgatgggcttccagaaatgctttgctatacccggctttccgataagcggtgtacacctcacgggtcttggcatagttgatgatatgggttttcagcacggcaatttccgtcagccttgcttctgctgccttgatggaatcgcccatggcatcatagcgttccattgccgccgctgcacgttctcgcagttcctcggcactgctgattttttgttcctgcaagaacagcagcgttttggacatctctttcagattgaacttcgttgcccactttttgtagccgacacttttgcctgccgccatttttccctgaatgtccaccagcaactggaaggactgttctttgggcggctgcttctgataggggtggtgcttcgcctttccctccagcactgctttgatctcgtcctcgccgtagccggtgcccaacgtgaggaaccggataaagcgtttctgtcccttacccttcaccgctgtgtgcttgccacgctttacctcatagccctgctgctccagcttttgcagaaaaacttcaaagtccttcggtttttctgcaaggatgatgtcaatgattccgcacaggcggtcacggttactttccttgggcggatagacgatgcgcttctgccgttcccggtagggcttgtactcaatggtggagagctgatgttccaaacaaatcaggtcgctcaaccgctgcaccgcaaaggaggaaagccagaaatttttgaatttgcgggtcccatccaaggcagtggaattataaataatgtggttgtggatgtgcgcccggtcggtgtgggtagcaacgataaaagcgtgcttgcccttcaaaaaacgctcggcaaactcgtagccgatgcggttggcttcctccggcgtgacctcccccggcttgaaggactgccgcacctgataggcgatgacatcgcttttctggctgcgcccggtggtctgctcatacagccgtttcgtcaacagaaattcttcgtccacggtcagcgggctgcactgatagctgctgaccagttcgccctgctcggtcttgtccgggttctggatatagctggtatggttatgcagacaagccccgatggactttcctttatttttccgcatggggatcaaccgtgttgctgccagtgccatcaccccctattgcaaagaaaaaatgccgcccggaggcggcattgagatcatttggatattttttcgtaatcggcagcacccgccagatacattgccttgtatctggcgcattccaactcattgcagatttcatctaaggcgagatattgattccacgcttctttgctgataacgctctgcaaggattcctcagctgctcttttggcttttttcagtcgcagatactcttcatcctcacccagcatctcagaaaaaatcgtgctgttgtgttcaaaataataatcctctatcttctgtttgctcatagcatccctcacagttctgcaagccactcactgaaacgcccgataccctcggtgatggcagttgcaccgaaaaagaggatgaagcagatgaactcggccaccagcaggataaagaactgatcccaagtctggcgataggcagtgtagatgccgcagccgaagatgtagagcatcagcggagcaactacatagctggacagggttagcagccaccttgccatcagagctagaaacgccacaaagagagaaatcgggaaaagaacaattttcttcagcatagacatcatatcaagcacttcctttctgttcgcccttattataaaggtatcgactactacgttgcaaggatgtcaagcattatatgtacacccgcagtcctccaactgcgggaatttttatagctctgccagcttggaaagaatttgcttgccaatgtcaatcagttcatccagacgctgccgcagatcttccatgtcggcggcgtagaccttgccgcacccgttggcacgcttggcgtactggttcagattgttgctgcacatctgcaagagatatgccatgcgttgcagttctttcaagtcgaggtgcaggcaatagccgtccagtgccatcttgcgtatataggcactcaggcttcggatgcccatggtgagcatcttttcatagatacggttcttttctgttttgctcaagcgcaggatgatggtttcatcccgcttttctttcatcgtgcatcaccatccttatcataatagctgcggaacggtttgacaggttccggctgattggtcttttcccccagtgcagccagcacagacggacgagttgcaggtgtttcggtttcctcggtttcttcgggagcatcctgcgaggaactgcggtcacggtcgatgttcagcaaggcgttcaattcagaaagtcgggcagacttttcggccagttcttcctcctgtgcaaagggctttgccacttcgacctctgcggcctgcttctgctgttcaaggttttgcagagcattttcggcatctgcaatacggtcagcgaaattgtcgatggcattgtccagacgagtgatattaccgcgcgcatcatcgcccagcgataccggatagctcaactctgcccggagtacggcttgatgctcattcttgaagctgtcgaaccggatgttcagttcaaagccacggtaggtgcccagcagcatcatatcagcattgggcatctcctgccgagccagcagcagccgttcgcctgcagcctttttgtcatcgtacaccatgcccttgatggtcatgccgcagaagttttctttgtcctgcgggtgtgctgctgcaatctgtgagtcctgtcgtaaagcagcaatgcgggttttctgtttctggatctcctccgggaaagttttgagcagcttatcctccagacgatatttctgattctggaagtctccgcgcagcaccttcaattttgctacctgcacgtccaagtccatcttttcccggatgcgagggtcgcctgcacacagagccttgatttctgcgtaagataaagcctgttcgtcaatatcatcgcaagatcgcataggcgatttgctcgtcatgatctgcgaaatgaacttctgcttattctctaaggtctggtacaagtaggcgtcaaatgtcgattcagtgacgtaattatagacgtacacttgtttgttttgattgccttggcggatgattctgccattgcgctgggtcatatcagacggacgccagcctacatccagatgatgcaccgctacgagcagcgtctggacgttggttcctgctcccattttggcagtgctgcccagcaacacacgcacctgtccgctgcgtaccttggagaaaagttctgctttcttgttctccgtatctgccacctgcctattacaatatatttggaaccggatatggtagccagccatattccattccatctcgttcctaagctacaataagagagtaatcggtagacgtcacctgccttgggccttcgcgtccgttcgaaagacagttcgccatctctcttgttgtagcattcgttttaagcaggttgagccacccgccaagcggagcgttcgtgtcacccaatagattgaatcggcaacgagtaaaagatggattccggttgcaaatacaaaataatggaggaaaaatcatgaacgcagtaggcattgacgtatccaaaggaaaaagcatggtttgcgttatgcgcccctttggagaagtggtactcgaaccctttgaagttttacataccgcccagaacctgaacgatctggctgggaagctcaaagatctggacggagagacccgcgttgttctggaagctaccgggaattaccacaaaccagttgctttcgttttacacgatgcgggcttatttgtttccgtagtcaatcccgttctgattcatgactacgacaacaacagtttaagacgtgtcaagacggatagaaaagacgctgttaaaatcgccaactatacgcttgacaagtggacacggctgcggcagtatcttccagaagatgatacccgactggctttgaagaattgttatcgccagtaccagcaggccgtagcgattcgtactatgctgaagaataatctgatttcatctcttgacctgacctttccagatgccaacaaattgttttcaagtcccgcaaagagcaacggatgcgaaaaatgggtcgattttatcggggatttctggcatagcgagtgcgtttctagtctttccgaagaaacctttgctaagaagtatctgaaatggtgtcagaagcatggatacaatttcactcgcttaaaatcggatgaaatctatgcctgtgcagtaagcgccgcttctcttcctaaatcacccacttcaaagctccttatccagcagcaggttgcacaattgaaagcagtatctcagtcagttgctgcattccagcaggaaatgcttcgcctttcccagcagcttcctgaatttgataccgtgatggaaatgtacggcgttggcccttctctcggccctcagttgatggccgaaattggagatgtccgccgtttttcctctaagaaatctcttattgcttttgcaggaatcgaaccgcagccgaacgactctggtaaagttgtagggaatgacaagggaatcagcaaagttggttctgccgtcttgcgccggacgctttttctgattatggcagctattttacagaatcagccgcaggacgaacctgtttttcaattcatgaacaaaaaacgcgctgagggaaagccctacaaagtctacatgatggcttcggccaacaagttcttgcgaatctactatgctagagtgaaagctgtaatggactccgaatactcacagtaagcatggatatttgttttctgcacatgatcctctcttgagcctgagctgaacccaaagaaccacttagctggcgcagcgaacccttgacaaaccgaagcattcaaatgctatcctgattttgcgagggctggctgggcttgctttgctattccctccgtcgccctcgctgtgttttgacaagcatttgaatgctgtttgtcatgggcagcggtcggttggcgaattttcttattttagggcttgacttttattagcaggtctttaaaatcaaagccatgttcgccatgctggaacaccacaaaccggccaaggacatttacgacgacgggcggttgtttctggacttctcggagcagacggcttccttaaacggcaagcccctgactctatccccgatggagtacaaaatgctgaacctgtttcgtaaaaatccccggcaagtgctgacccgtgggcagcttttggaaaagctgtgggatatagacgagcggtttgtggacgaacacaccctgacaacctccatcagtcgtattcgcagcaagattgaagccgacggcggcgcaccctacatcaagaccgtttacggcatggggtatcaatggacgggaggcgaggcaaaatgaagtttcaaaacctctcggtaaagcggctgtttggccgggtggcaatggagcttgtcctctccatgtccgggatcaccatagccaaagtgtagtgggctcttcgaggactctccgagggagaacgtctcctgcgggagagctccgatcaagttcgcacaatgcgaacttgattgctccgtacgcatctgaaaaaattgcgtacggacttcaaataacccgtacggtctgtacggtgtacggagacgcgaaatataaacgatgacgcgttttaatttacttctacttgccgtacgggtgcgtacaagtacagaccgtacaggttgtacgaacttcttccgtaaaaaaaacctcaacgacttcaacaatatgaagtacgcttgggtcagcgactggtaccggcaggccatgaacaacttttggatccctgaggagatcaatctctcgcaggatgtgaaggactatccccgcctgctgtcagccgagcgcagcgcctacgataaaattctgagttttcttgtctttttggattccattcagacagcgaacctgcctaatatcggcgcctacattaccgccaacgaggtcaatctctgcctgtccattcaggcgtttcaggagtgtgtccactcacagagttacagctatatgctcgacaccatctgttcccccgtggagcgcaatgacatcctctaccaatggaaaacggacgagcatctgctgcgccgcaacaccttcattggggactgctacaacgagtttcaggagcggaaggacgcttccacgctgctgcgcgtgatgatggcaaactatattttggagggcatctatttttacagcggctttatgttcttctacaatctctcccgaaacgggaagatgcccggctcggcgcaggagattcgctacataaaccgcgatgagaacacgcacttgtggctgttccgcaatatcatcacggagctgcaaaaggagcagccggagttgttcaccgccgagagcgtacaagcgctgcgcgagatgatgcgtgagggcgtggagcaggagatcgcatgggggcattatgtaatcggcgacgacatcccggggctgaaccggcagatgatcagcgattacatccgctatctcggcaacctccgctggacgagccttggctatcccgcattgtatccaggctttgagagcgaaccggagagcatggaatgggtcagccagtacgccgacgccaacatggtcaagaccgatttctttgaggcacgcagtaccgcctacgccaagagcaccgcactgatagacgatttataagaaaaccaaagacatcagaataggagatactactatgaattacagcgctatgatccaatggtggatactgccggctacgttggtgtgctggtggatgccgcaaagtaaggcaagaaaaataacgttcctctgaacacaacaacgcccgccgggagatctcccggcgggcgctgcttatttattatacgcagttagcataacccaaccgtctggtggaagaaaaggcaggccacctctatgcagtctgccttttgcctgatgcgaaagcccgcagacacgcggggcttacagcaccagcgagggcgcggtgtagacccgtgccttcagctcgctgtttagcatatacagccccttgctgtcgccgccgaacagatccatcttggtaatgaggtcagcggcgttcttctcctcctcaccctgttccttgatgaaccagtccagcatctgcatggtgcggaagtccctgacctcgtatgcggcggcgtagatggcattgatgctggcggtgatcagcatctcgtgttccagtgcttttttcagcggggccatgtggtcgcctcgttcccactccggctttgcgacagcctcaaaggtgacgtcctcgccgttattctgcaaatactgataaaacagcatggcgtgatcacgttcctcctgcgcctaggacgttgttgacgcaggcatttaacttgctgttggggtcatcgggcagagcggaattcatcaaccgctggtcaagaccgattttgcggccatccgacgtaattttcaacatattatccacagaagggtcaacagaaccgctgtggacttcggctgcacgttcgctcaacgcttgcaccatgtcctgttggatttccgaaggtttgaccacaaccgtctcaaattttgcatcaggcaccggaagatgaagctgatcgctggtcttgatatccgccgcttctttgaacatcgccatcagctccgggaggttgaaaaacttggcaaaccgggtgcgtgcacggtagcccgtgccctcgggctggacttcgtcaagaggttttcggtaatttttctaaattcatcaggttgtctgcaaggaagtcccgtgtaacctcatgtctgtactcttggattttctttttgttctttcctaccgtatccacgaagtatcccctggcccagaaatgccgattgccatacttatacttcagatttgcatgtctgtcgaaaattatgagactgctctttcctttgagatatcccatgacgtaggaaatgctgtacttcggtggaaaacttatcagcatatggatatggtcagggcaggcctccgcttcaatgatttcaatacctttttgttcgcacaactggctttgctccgtttttgaatattatgaacgaatggtatgccaaagacacgagcaataaaatcaaggctgtgttcgatgcccggatgaaagatggaaaacgttgcagcggctctattccgtatggatataaccgtttgccgaacgacaagcagacacttgttgttgatccggtggcatccgaagtcgtaaagcgcatttttcttcttgcgaacgaaggaaaaagcccacggacaatcgcagaactgttgacagaggaaaaagtcctgattcctgctgcatacgcaaagaaatatcacccggagcagtacaatgggacaaagttctccaatccgtacctgtggggcacctcctccgtaagaacaattttaggtcggcaggaactgcccgtgccccctgggtgccgcaggcccgacggtattattacaatattatcgggaaatatggcgcacaggtgcaggctctgctgaaaaaaatctccgcgctggagatcaaaacgatctgcccgctccacggtcccgtgcttacagaagggctggaggagtgtctgcggctctatgatctctggtcacaatgggaaccagaagaatcggagagcatactgattgcccacgcatccatccatggaaatacttttgctacctgcacgtccaagtccatcttttcccggatgcgagggtcgcctgcacacagagccttgatttctgcgtaagataaagcctgttcgtcaatatcatcgcaagatcgcataggcgatttgctcgtcatgatctgcgagataaacttctgtttattctcaagggtctgatagaggtaggcgtcaaatgtcgattccgtgacgtagttatagacgtagacttgtttgttttggttgccttggcggatgattctgccgttgcgctgggtcatatcagacggacgccagcctacatccagatgatgcaccgctacgagcagcgtctggacgttggtccctgctcccattttggcagtgctgcccagcagcacacgcacctgtccgctgcgtaccttggagaaaagttctgctttcttgttctccgtatctgcgttgtggatgaactcgaagagggaaaaggagcaatccgctttgagatggcctcgcgtccgattagctagttggtgaggtaacggcccaccaaggcgacgatcggtagccggactgagaggttgaacggccacattgggactgagacacggcccagactcctacgggaggcagcagtggggaatattgcacaatgggggaaaccctgatgcagcgacgccgcgtggaggaagaaggtcttcggattgtaaactcctgttgttgaggaagataatgacggtactcaacaaggaagtgacggctaactacgtgccagcagccgcggtaaaacgtaggtcacaagcgttgtccggaattactgggtgtaaagggagcgcaggcgggaaggcaagttggaagtgaaatccatgggctcaacccatgaactgctttcaaaactgtttttcttgagtagtgcagaggtaggcggaattcccggtgtagcggtggaatgcgtagatatcgggaggaacaccagtggcgaaggcggcctactgggcaccaactgacgctgaggctcgaaagtgtgggtagcaaacaggattagataccctggtagtccacactgtaaacgatgattactaggtgttggaggattgaccccttcagtgccgcagttaacacaataagtaatccacctggggagtacgaccgcaaggttgaaactcaaaggaattgacgggggcccgcacaagcagtggagtatgtggtttaattcgacgcaacgcgaagaaccttaccaagtcttgacatcctgcgacgcacatagaaatatgtgtttccttcgggacgcagagacaggtggtgcatggttgtcgtcagctcgtgtcgtgagatgttgggttaagtcccgcaacgagcgcaacccttatggtcagttactacgcaagaggactctggccagactgccgttgacaaaacggaggaaggtggggatgacgtcaaatcatcatgccctttatgacttgggctacacacgtactacaatggcgttaaacaaagagaagcaagaccgcgaggtggagcaaaactcagaaacaacgtcccagttcggactgcaggctgcaactcgcctgcacgaagtcggaattgctagtaatcgcagatcagcatgctgcggtgaatacgttcccgggccttgtacacaccgcccgtcacaccatgagagccggggggacccgaagtcggtagtctaaccgcaaggaggacgccgccgaaggtaaaactggtgattggggtgaagtcgtaacaaggtagccgtaggagaacctgcggctggatcacctcctttctaaggagtcaggcaatgacagagcatctaagatggtcagtcattggaacaggtgacaagttaaagtttgagtagatattgttcgattttgagggccctgaaaaggttttccttgggatggaatcgggctggcgcacaaacgccagcttcgatttcatcgagctgtctgcaagaccgcaatttcaccggaacggtgtataattgcgccctttattctaaagggttttggacgttgctgcgttcgtgaacgtcatgcaccatctttgcaagcgggtgtataattgcgccctttattctaaagggttttggacgttgctgcgttcgtgaacgtcatgcaccatctttgcaagcgccagcacgacttccggctgacggaacgagatcttcagcagttccatcacctgatcgtcggtcagctctcccggacagaccagaaagctttccagcattccggcacgggtgcaaaggcgatgcacacgctctctccggttcagctctgacatttgacgttcaagaatcttctcccgatgctggcaagagcgcagcttttgctctgctttggctttttcgctgcggaggtaggcaagatcggttttgggttgggtcaatggcatcacgctccctctaaattctatttgatcggaatcaacctgtcctcaatttcaattctgttaacctgatcaaaatcatattcatagatagatgcaataatcagctgattttctgagaagtctctctttaagatgctcatcatcatctttatattttcttgatcaacttcttttcccgtgggagaatccaaaattatgggcaactttataccaagttctttttcaacagccaagatatatgctaatctgaaagaaaaaaccgttttatgaagaaccgctcctgataattctttcagatttgaggtaaatagataagaaggagaaatggtgtcatcgtcacccacacccatttctgttgcgtaacgaagaatatctgtatacaaactcattacaacagcattgttgctctttgttaattctcttatttcagcgcgaacactttttagctttttttcggatttatccaattcatcctttattacgacagaattcattggtgttgaaacaatgcgtttgtcaaaaacttccgcaaggttttcagaggttagaaaagacatttgttcattttccgctgcttttaccttttctttttgttccagctgattttctagagttgccagatcgaatgaaagcattttgcgttttgaaaccagcaattcaacagaatcgttgagccctataatgttatcttctgtaactggaatctgatttccactctcatcctgaacaaccaagttcatttcggatacaaattttcggaaatttttattactggatagtgcccggtctactcgtttgagttctcgcttaattccacctatttggaacaaaatttgctgaatttcacttgtggcatattcattataactctctggtgcaaggcttcccatatcagctgccacttgatctctatattgagcgatactgaacatttgtttgtactttgaaatgttccttgtcagtctgttttcttctgcaagtagttcattgcagttgcaaccggaaaggccacgtattaattcctcaatattgaaatgaatgcttccaataactgttccacgatttaacaacgtccaacctttttcttgatcaatataaaaagttcctaataaattcaaaagaatatcgtcattgcaatttccaaacagcaatttatgaaactccaattcttgcgctggaaggacaattgtgctcttttggttgccatgcgtcagttccaagaaatccttgttgtagcgtataacagacacttctccaagggcatcacaataaagatgtgtttcaacctcacactgatcaaaacgcatcctctttgtgcttggaatattatatccgatagagtacagcagcagtcttaatagagtggtttttccacagctgtttttagtgctatgaatcaaattcgctccatcagaaaaatttatcgtgcgctcaagtaatccctctttaatgcggatgctttgaaatctcatagattcaccccactcttcacactatctatcttgtttcttttagttataacattgtaaagaatcgttttgatcaggatttcttgcacttcttcatctataccagtatcatcaaacatatatgtatatttttcccaatatgagtctacgaaaccaaaagctgtttccatacggcttttatgttctgcaccgttcttgtatgaaatgtattctcttaaaatatccttaaaaaactcatacttctcacagcaatcagtaattaagcccttatattgactgattacttcatcataaatatctgaatccaggtgatcgataaatttttcgcttgtttgatcaatatctgtaataatcacaagtattggcccgatgatctctttcttgctaacacgaatggcaacattctttttgcttccatttctttgtaaatcattttgccatgcttgcataagtttctttcccatgcttaaggagctcaaatggagatcttctgcgaattcttctacggcttttagaacatatttataacgttcatcctcatcatcagtttcgaagggaagagtttgaatcagaagtttttcagtgtccaacggatgttcaatcttagcaagataatcatcaattattttctttgatgaatctggcaatgaatcataggttcgataggacggtggcccagaaaaaatacctttggaagcctcgtcgttaaacggattaaaagagttcgtgataaaaataagttgtttcacgtttgtagccttgtttccaccctctgacaaagttttcaaggccttttttagatttgcacgtacattatgaaaattactgctccccaattgcacaccctttgcttgtgccaaaattttttctccatcagtaagttggagttcgatatcctcataatttccttcaatccgaatagtatcaagacttttgatatttcttagcattagaatgatcgcagcatttacctgaaattcaaagccaaacataacttggtctgcacgtctgctagcaagctccttttcgtcatccataatatgtagccaccttaatctttaatgtccgaggactgttacaaagaaaccgagaatttattacctcataccgcagttttgagtcctttggatttttcagaaacggtatgatcgatatattttttccaagaaggtgcctccaaaacatctcgctgcgattcacattcaagcagcagatcacaaagagtttgcggagttgccttatccgcttcaaacatagcaacaaaatatttctggaactgtgccaatgtcaacggcacgatatcaaggcgctgcttcacgtcatctttggcataccagataccatgtcggaaggtttccgccgtattggtatcaatcctgacagcaataaacattccgtagacgggcttatcatatttaagaactgcatcagaaacatggcggcggacaggctcaccctccatagcttcctgtctggaagaagttgacattgtaacctcagtcaagatggtgaaatcctcaaattcacagtacagatcacccttgccgccacctgccgccgaaacaggcataaaatcggaatcgagtttgaagccacgcacctcatagggcatattcaccagatggtcaatggctaatgatgctctccaaagcgtccactctaagtaagccggggtttcgtctttgggaacctcaatggcgttatcctcgtcatatacagtttttccgccgcctttgattaaaagcgtcatatagtcggaaatttctttccactggttgcactgcgcttgagcatactggatttcatcagtttgggcaataacgctttcaagccgacgacgagcaatattgatctccgttggagtgtccaacggaagatcagaaatatcaaatgcaatccgccgttctttcatctggcgcatcaggtcgttcaaaacagatttcgctacatcttcattatctgtaggcaacggagcaccattacagagtattctgtattcttcgataagaggtttatcattcgctgtactttttgcaagagcttctgctagcacatgctttgcaggtgaaataataaggccacgaccttttcgttgtaaaacacctgaaatgcgaagataccgcatattcatatcagaatagtccaagaaattatccgacttcttatcatagtctttagcccgaacagcgatttcctgccgatcaaaggttttctttgcgggtgcttttgctcgtcgcattcttaaatccaagatattgtccacaacctcagacaaagaatattttggatttgtagtgtgtccccacaatgcaaattcaatgcggctcaactcagatgagccagttcttttttcaagttccagcataatggcaagaatccatcttaatggcgaaaaatacgaagattcgccagccagaggaaactgttcgacgctcattgcccgcaaaaagcactcttgaacagcaggataagtgtccgctttcaaaaacacacgtccgaatggcgttatatcgtccatctttccaagagcagcttgttcaccatattttttatcaagcttcggatagatcaagccgttcttagagaacataagccgccattttctggcgtgactgccggattcatcttttccaccttcattttgaatgatacctttctcattcagaagattcataaacgcaatatcgttttcccgacctcggagatttccaacgaaagaggattctgcaaatacagagaatccatccttgattctattaggatttctgagaccagtgtttccaaccagccaaatatcaatcggagtccccattttgaacttcctccttaatagccgacaaataaatactcctgcacagagtttcgatgggttttggcttcgccttgatttccaaaggaatatttatagtcaacaggaatcacttcaacgtgctttttgtaccgagccataatctctaacatttcgtcttgtgtcggaaggctgttggaagaataagacacaatcagaatactgttcgcaaatttcttaaaaagcttatcgaacgcatctgccgccccttttctggtggaaaaaggggtcgggtaggatttgaattttttggtctgggtgtgttcttgaatttcaacgcccttccaatcacgagcaagaccctcgacaaaatgataccttctgacatattcgttgtcggatagcggagaataatatggagggtccatatacacaaggtctgccttgtctgcccggagttccattgcatcgccgtgtttagaaagacagctcattccattgtcaaatacggcagcatttacggcctcgacagcttccaagaactgctgctctaagctcttctgtaagtccttacgaccgtcattgtaccgatttcctgtataggtaaaaattccgcggggtctttttttagtacaggcacgaattaaagccgtcatagcaatagcacgtttgtaagagtctttaatacctgcaatatttgtgcgaagaatgtcgatcagttcgttttctgcatcagtatagtataaatccttaaaggtggtcgcaacaaaatggtctgattcctttttctttgccaacagttctttggcttctctttcggacaaggtaacatggctgttctcaatcattgcttttgtaaaagtcgcagacattgccatgtaatcgttactgataacagatttaccctgtgccttgaacatataaccgacaataccagaacccgaaaaaagatcaaccgcagtttcaaactcaaactgtgacgcgattgcccaaatctgagaaagcagtttacttttagaacccataaatcgtgtgggcggataacaagatacctgctgcggcagaggttggggagcgagtttcataagagttttatgtttcggaggaaccgtaacgataacatcctcgccctttctgctctttccattgcaggagatgtgacgtttcgtttgaatcacatcgatcttaaagggagaatacagttcgtgaaccagcggatggttagagtttgtcaatacaacagagcagcccatatcatgcagccgcatcaccatctttgcaagttccacatgatcttcctcatagaactgttccttggtataccgtttgaaatcagaatattcagaaattggaagataaggaggatccagaaaaataaagtcacccggcttggcataatgctccagcaccagcaaataatcaccacaaacgatctctgctttctgcaaagccttagatactgcatgaagattttcttcatcgcagattttgggatttacatactttccgtatggaacattgaattgacccttgcggttgacacgatacaaaccgttaaagcacgtccgattgagataaattgttctagcagcagcctccgcaggaggaagttctgtccactctagcgcacgaacctgataaaacatctcgctggtatttttgtattttttcagatagtcaatcacatcatcgagattattggcaacctgacgatacatattgaccagttccgggttgctgtctgctataattgcattttcaggccgcaaggcaaagaaaagtgcgccgccgccgaagaacggctcaatatatcttccataggaggaaggaactttaggcagaagatcattcaacatctgggtctttccgcctgcccatttcaatataggctttgcctgaatataacttaaagttcttgcggtgttatccatagtatgccatcctcctttcaatcttcatttttagcagttagttccatgatgtcaccaatatcgcattgaagtgctgtgcagattttcaccagaacatctgttgtgacattttcattttttcctagtttggccatggaagtatggctgattccggctgcaacacacagatctttctttttcatatcccgatcgatcagcagcttccagagctttttgtaacttactgacattgattttctcctaatgcttgttttccatcatcttggaactaaattccgcaatcgctgaatttcaagcaatagtatatcatcctgacaaaggatactcaagagccgctagcaaaaaagcacaaaataaaattcagcagaagccgaaaagccctccgcatctgctgaattctgtattcttttttacacaggcaggattgataccgccgcattcctgacctgatacgtcacaccgctggcttctccctttgtcttgcggcagcacacctccgggtgctgcgatgcaagggtatccagctgcttttgcaaggcgggattcagcgtaaatacgctgcttgttccgtcctcgctggcatagatcatggtttccagcttaaacatcgtcaatcagttctccctcctcggattcgtcaaagatggtcgggccccagtcctcgtcctcctcgatgtcctgcatcaggagcagcatgttggtgtagcactccatctcagcacggacaaagtagaacatctggtcgtaccagtctgccagcgtttcgtcctccagcttccggcagaagtcatacaccatcttgttctgattggggtcaaccgtcagcccggcaactccgtacagccgcttgcgggtcagttccagatcggcgcagccataggtgtagagcagcttcttttcttcaaacgtcagtttcataggcttgttcctccgtattaaaaaagggcctgccctgtgcagacccgatgtagcaaaaagaccgccgtgcgttgtgcagggcggtcttgaactcaggattggagaaaatcccggagttcatcagcgaaaaaggagattttggcgatagcagctatcgctatgtaaggcaggatgaaaaccacaaatgtggtaatcagcattttcaggacttcgccgccgtctgccagcttcatgatccagcttgctagagccacgaagaagaacagccctgcgagtaaatttgttaccaccgacgaaaaagtggtaagaaaaatgccagcccactgtgccagaatcagcagcagaagcagcggaaaaagggcaagtttcagcatcggtttcagcacagtcatcgtgggcacctccttatacaaaaatcagctcggtcttgatgatctcctcggcatggttgcggatgctgttcatccggcgcacccactccagttgatcggcagctttcagggcttcggtcacgccctcggcttcctgcatctgccggacggtcaatgcaagctgttcctcggcttgcttgtccagcttggcaaggtagctgcccagcacaccggacaggagcagttgattgtaccggacagggtgctgctccttcagatacaccttatgtaagcggccccaccgcccggtggggtgctgctctgtcggggctgctacggtcagattcggcagatagtggtcattgacaagggtgtagtccagaccgttagcgttgtcatggatggaatttttcatggtagtcatgctgcattatcctcctttggtttcggcgttggggttgcttctggatctcgttttagatttccttttttcttgtgatagaattccaaggttttcctgttgtggtcaattttcctgcactcatcggaacaaaattcctgctggctgtgtgtaggccagtaggagtgaccgcacacggcacaggtgcgctgccggtagtagtgagttcctctctcggcttctctatccgctttcttttgctccagtcttgcctgattccagcattcccttgagcagaaaagctgtcggttgctcgtaggtgtaaacaccttcccgcagtgcggacacgttttggttttaatgatctcgccaccgttttcagcgattttctttgcttttcgcttttctcgataggctttttcacgtttgcgctgcttttccatgcgctgccgttcttcctgctccttctgcgctttcagttcggcaagttcttcctcagtataagcaatatcgacttggccgacatagttgaaataaatgtcaaccttttgtgtgcgggcattgcctgcaccctcggcttcataaacaacgattttatcgacaagttcgttnnnnnnnnnnacgaatcagcaaaatgaaatgttgaatatcagcggaacttgatttatcttcggcaatttcggatttcatcgtttccatctgcgattccaattctgcttgctcgctatcatactgtgccatcagctgcttgtactgtcgttcgggcagcagtccagacataagattttcgtacaggctacgaataagggcagaaagctcatcatagcgtttttgacaacgtttcaattccgattggttctgcttcgggacgctccgctgggccagaggcagggaggggtgttccgactcccccctccctacctctggactccacccaccccgcaacgggccaagggctgctcgcccttgacaatcctaaagaagaagtcgaagcacaaaaaagctagcgctgcgccagtcggcgctatcgctttaacgcttttttcgctttttccttgggatggaatcgggctggcgcacaaacgccagcttcgatttcatcgagccgtctgcaagaccgcaatttcacacaaaggggtccccggaaaagcatcgaagatgattttatggggaagaggaggaactgcggagtgaatgagcatttgtgctttttgcacagatgcgaacgatacgcagcaagtgacgacgaggtgtataattgcgccctttattctaaagggttttggacgttgctgcgttcgtgaaccgcactgatagacgatttataagaaaaccaaagacatcagaataggagatactactatgaattacagcgctatgatccaaaatcgcagatccgttcacgcattctgcgaaaaggaagttccgagcgaggctatcggccagctccgatcctactatgaaaagacctgcccccgtcttgtcccggagattgcaacagagttgatcgtcttggacaaggatgcacagccggcgctggagagctcagcgggctataatcaatttctcatcggagcaccgcactacctgctccttatgtctgccccgcattcctatgcggccatcaacgccggctacatgatggaagatctcgtcctcaagctgactgagttggacattgacacctgctggatgaccttcaccgacagcgacaaaatcaaaaaggcactgtctctcgccaccccgttagaggtggcggcaatcgttgcctttggctacggggaaaagaccgcaaaaaagctgcggctgaatatcctaagtatgtctcagatcgatgtgcgggccgagcagcagtactacgcgcccaaaaagggcgtgcatgatttggttcacatggggagctggagcaacaagtctgggcttgacgagatgatagacttctacgacgatatgctctggcagtccttctacgccgcttcgctctcccccagctatctcaaccgtcagccctatggccgttgaggaggtagtagtcccccttatccagcgccgtggtctccgtgccgccggcgtcggatccggcgttggtctccgtaaggccgaaggcgccgatcttctcgcccttggccagcggaaccagatatttcttcttctgctcctcggtgccataggcgaaaatgggccatgagccgagggagacgtgggcggagaggattacgcccgtgccgccgtccacacgggccagctcctccaccgcgatggcgtagctcagagcatcaagaccggcaccgccgtactccttggggtagggaatgcccatccagcccagcttacccagcttcttgacagcctcctcgggaaactcattgttctgatccattaaaaatgcgaggggcttgatctcctcctccgcaaaactccggatcttcgcgcgcagctcttcgtgcgccgacgtggtttgaaacagcatacgttgtgctccaaaagctgcctcgaagccgattttctcaaattatgtgacgccgtcacagtaaaaccgcttgtcacgcggtatactacgcataaaagcacagccgcagagtacatctgcggctgtgcttttgtgttcagttgctcactgttgcgtggactggatatggagagacaacatatctcccgatcttacatgggttatcttatctgccatcactctggcagtttgccttgcagatatgtcggcatccccactgcggtcgtatccggcctgaccttaaacatggctttttcaatctacctcccttatcggttttccgcgatatatttctccgccatgtggactgccaccgcgccgtccgccacagcggtgaccacctgacggaggggcttcgtcctcacgtcgcccacggcgtaaacgccgggaacactggtttccgtggtctctccggccacgatatagccgccgccgtccagcgccagttgacccaccgccagcgccgtggcaggctgtcggcccacgctgacaaatacgccgtcgcagtccaccacgctttcctcaccggtgacggtgtcccgcaggcggacgccggtcagcctgtccccggaaagcagcgcggaaacgacgctgttccaacggaattccacgttttcggcctgtgacagcggctcgtgatagctcttggtggcccgcagggtgtctctgcggtggacgaggatcacttttttcgccacgcggctgagaaggagggcatctgccgcggcggaattgccgccgcccaccacgaccaccgttttgcccttgtaaaacatcccgtcgcaggcggcgcagtaggccacgccccggcccaacagctccgtctctccggcaacgcccagcgttctgggatctgcgccggtggccagcaccacggttttcccccggaagatcccctcgctggtctccacgagcttgggaaccgccgtcagatccatgcggagaacttccgcgtattcgctgcgtgccccaaaacgctccgcctgcttttgcatcttctccgccagagagaagccgtcgatcccgttctcaaagccggggtagttgtcgatctgctcggtcagggccatctgcccaccggcggacagtttttccagcacgatggtgtccagccccgcccgtgccgcgtacagggcggcggtgtagccgcccgggccgccgcccaccacgagcatatcataaacatgattattgttcatatctgaaccctccgttatttcgccaaggcttcctgaatgaaacggtcgatttctgcctttgagccgggcgcgatgatggaatccacggcctttccgttccggtacagcaccagagttgggatgtcctcgatcccctcggcccccgccagccgcggctcctcgtcaatgttgatcttgccgacggcgaggctgtccgcgtattcctctccgatcttctcatacgcggggccgatcctccggcagtagctgcaccagggcgcccagaaatccaccaaaacgggctttttctcccggatcgcctgctcaaactgctcctgattcatgttcatagctgccatatctgtcagctcctttcctttgtttgggtattctcaagactccggtctcgccccacaccacatcgtgacctcaacctgagatgacggtactctgcccttgggacataaagcagatgagtaagaccatcatctgtacgaaaatagctgcggtttattgcagcttattctgcgcagagctcagccaccagagcgtccatctgcgcttcgctggtttggttcaatgcaccacgcagagacactaccgtttcgtaaaggtggatatccttcatctcctccaatttggtgcgccgggcatcgaacacagccttgattttattgctcgtgtctttggcataccattcgttcataatattcaaaaacggagcaaagtcattgtctgaagcattgttgctgtcgatgctgttgttgattgcaaggaatcggacgtttttctgtgggaacagaatttccgtataaaaaccgacttgcagataatttcgtcctaagcggctcatatccttaacaatcagcgtttcaacatttcctgcttctacttcttttatcagcgattgaaagccgggacgattgaaattcacacctgaaaagccatcatctgtaaaatggcggatgttcttgaagccgttcttttgggcgtaatcttccagatatttcttttggttggtgatggaattcgattcaccagcaagatcatcatctcttgacaaacgctcatagagtgctgtgatttttggttctttaggcattcgttctacctcctttcctatgtaatctttcaatttaggacaatcaattttattgtcctgattaagtatagccttcgggcgcaagttcaatggcggtagtggtctcgccaaaggtggatgcccagcagtcgaaatgggtcagctttttctgttgcagggtactgtactgcaaataccgcatgaccgtgtacagctcggtcatggagttgctcacgggcgttcccgtagcaaacaccacgccgcgcccgccggtgatctcatccagatagcgacacttgccgaacatatcgctggatttctgggcttcgctagtggataatccagcgacattacgcatttttgtcgtgaggaacaaatttttgaacgcatgtgactcgtccacaaaaagtctgtcaacgcccagttgctcaaaggtaattacatcatccttacgctcatcggagcgcagtttttccagcttggtttccagcgttttgcgggtcttttccatctgcttgatggaaaaattctcgcctgcatgggctttcagttcgttgatggcggcaagggtctcgtagatctgctcctgaataatgcgctcctgccgttcaaaggacagcggaatgcgctcaaactggctgtgcccgatgatgacggcatcatagtccccggtggcgatgcgggcgcagaattttttacgattggcggtttcaaagtccttgcgccgtgccactagcaacttggcattggggtagaggttcagaaactccgaagcccattgttccgtcagatggttgggcactacaaaaaggcttttctggcacagtcccagccgttttgcttccatggcggatgccgccatttcgtaagtttttccggcaccaacttcgtgcgcaagcagcgtattaccgccataaagcacatgagcgatagcgttgcgttggtgttcccggagaatgatttccgggttcataccgacaaaatggatgtgggagccatcgtattcacggggtctggtgctgttgaacaactcattgtactgttttaccagcgcaatgcgccgctgggggtcctgccagacccagttggcaaaagcatccttgatgacctgctgtttctgttgcgccagcatggtctcccgcttgttcagcacacgcttgggcttgccctcggcatcctcgatggtgtcatagatgcggacatcttttaggttcagggtctcctccagaatcttgtaggcattggcacgggatgtgccgtaggtttcggaagagataatgtcgccccgccccgtagcggtcttaccttccacacgccactctgcggtataaggagaatatctcaccttgactgcatgacgcagatagtagggaatctgaaaggtctcggtcataaacttttgaatgatctcaggtgcaagccatgtggcacccaagcgcacatcaatttcagaagcttccagttctctgggctgtgccttggtcagcgcatccacattgaccacaaattccgggttggtctcggcagcaaactgcgccatccgcagctttgcccggacatcgccggacaggtactcgtctgccatctgccagcctgcttccgggtcggtggggtcggcggcagggtctttgaaaatcacaccggaaagttcggtggtaatgcgcccgtactcaccgggggttcccagcagttctgccatatagggcaaatctaccttgccatgctccccgatggacaccgccaacgcttcgctgggggtatccacgctggtgacggtgcgctccgggcgaatggtgcgcttggtgaacatcgctgctttggatttaagctgtccctgctcgtccagattttccagcgaacacagcagataatacgaggaatcctgctcaaacagccgcccatttttgcggtcgttcagcagaccgtattttgcggtaaaagcatcgtaggcggcgttcaaatgctcctgtgttgccttgatgtcggcatcggggtaatcctccaactgttgctgaatcaggtcgttaacgatctgccgaagctccaccatgccggtgacacgccccttggcggtatcggacagctccacctgcgtcatgacagagttttcgcggtaataaacatctccttccaccacggtataactgaagttcttcacatcggggtctgcaggcagggtcctgcgctccgcttccgtctctgcaatgtccggcacctccgcaacagcttccagatactgcccttccaactgctgcacagcatcacggagctggtctgccagatttgcaccttctatcgggacgaccgtagcttcttctttgccatactgtgtgctttcggttgtcaatttacccagaatcatctccgggtggtccgcaaagtagctgttgatggcgatgccatctgccgtctttcccagctgcacccatgcgggttcatgatccatgggccggtcgcgtttctgcaaaaagatgatgtcactgacaacatcggtgcccgcattggcgcggaatgcgttgtttggcagtcggattgctcccagcaaatccgcacgctccgcaatatgcttccgggcggcagaatccttactgtccagcgtataacggctggtgacaaatgccacaataccgccgggccgcacctggtcgatggctttcgcgaagaaataattgtggatgctgaagttcagcttgttatacgctttgtcgttgactttgtaattgccaaacggtacgttgccgaccactaaatcgtagaaatcacggcggtcggtggtctcaaaaccggctacggtaatgtcagcctgcgggtacagttttttcgcaatacgcccagtgatgctgtccagctccacgccgtacagccgactgccctgcatggtgtccggcagcattccaaagaagttgcccacacccatagacggctccagaatattgccgctgcggaatcccatgcgttccactgcatcatagatggcacggatcacggtggggctggtgtagtgagcgttcagggtgctggaacgggcggcggcgtactcatcctcggagagcagccctttcaactctgcatattcctttgcccaactatctttgccggggtcaaaggcatccgccagaccgccccagcccacatattgcgaaagcacctgttgctcctcggcggtggcaccccggtgctcctcttccagcttgaacagggtacggatagcttcaatgttccgagcatatttctgctttgcgccaccctcgcccagatggtcgtccgtgatgtggaagttcccggcaagttcaagtgtggggcgttccgcttcaactgtgggcgattctgtgcttatcgtctgaattacaatgtcaaacggcagattgttttccttggcggggtatacggcaaccgttttttcagtgcgaactggccgggtagaatttggttcgttctgccgcagcccgtcctcgaattgttgcttgttgataacctcgttatcccacgactgcccctgtgcgctggtgtcgatgcgaacatccgtttcgcccacatagccgattgttccttcgatggtttgggtaggaagatcaacgataacattgtcaccgaccttgtaatcgggtagggggtgttccatcgcatcctgttcctgttcgtacaattcccggacaagagccagcggttcctcccggaaaactggcatccgcatctctgccagtgctacatcctgcagggacacactgcccttatcgaagttgacgttatccacccggaaagcgcgtccttccatgtggacggtggctcccagcggcagataatcttcccggcgcagatacttggtctggtggtgggtgccgtcctcgttcagcccggcaagatagacattctcgccgcactgccacagttgtttggcacggtgcgcccactggtcgctagggaagccggtgagcgggacggtgcccagcgccgtttctttttccagcaactttccacctacaagttcgcagatcttccgggcatcctcgccgtaaaactcaaactgtccgttctgctcaaagcccaccagcgcatccgggtgctgctccttcagggcgttgtactcagtggcggcatccagcggcagcagtgccgggcgttcctctgccttgctgtggtagtgctccagttcttcgtctgtgacactgacgagttcggagaaatccagagcctccagctcggtctcggtcaggtcctccagactttcgtactgccgctcgtccacaagaatatcgcccagatagcgctccacacggtatcccaccaaatccacattaacttgaatgggaatctcctcgtctgtggcgttggtgtaggcgatgccgatcttggacaaattggagaagtccggttcagaatcatattcctccagacagaaatcccggatcaggtttttggcatgagtcaaggtagcatctggttctacggtgatgggcacagggggcgtgtaatgttccttctccttgtccgtcagatagcggtcggattggaccatcaggtcgatatacttttccacctgcgcccatttcagggtgattttctggtggtcgggataatggtcgaattccagtcccttccagtcgtggttcacaaagccccggcttccgtccagaaaatcgtgagagtgcccaccgatgccgtactcttttgccagtgccttggcacggagattgcggtcaggcagggtctggtacagtgccataatgcgctgtttaccacccgcaaaccccgaaccgtgcttacgcaactcgttctcaatttcagcctgcgacaaaacaaaagcggagggcgttttttcgctctccgctcggtcgatggtttcaatttgttcagcttcggtaggaatgtgtgcatcgaagaaacttagctgtaaatcagttctgtccggattacttcctcgacctgctcctgcaggctgttcatgtgctgcacccacgccatctgattctgctctttgtccggggccgggttcttcgccagcagttcggtcatcatctgctccttcatcgctactgcggtctgctccagttcggacagagtcgggtacaggcttccgttcaggagcatcgaattgtacagcaccgggcgatgctgcatcaggtaagtccggcgcagtctgccgtacttgcccagcggcttccggggctggttcagggtcaggttcgggagaagataatccccggtctgcgtgtaactcagattgctgctcatattcatgctggctcctttcattgtttcggcggcgaatggttgtttttacggtgcgctcgatgttccgcagcacctcccggctcatgtcgctgacggctgcgccgagggcaaagacggcatccggggtggaaaactcgtggatggctcgaaaatcttccttgtcgaaccacgctgtcggttcaaacccacagcgttccagcagcgtataggtgacgctgatggcggcggcagacttgaactgcatctccaccccggcttcatcataatccatcagcagcgagccgtcaacgatggcgcggatgtccccgccgttgttgtcccagtaatctgccaccagtttccctgcaacgtccgcaagctgctggctgacacgctctccgctgatgccataggtggcggcgagcatttccgaaaccggctgtttcaggtcatcgttgtactgccacacctccggatcacgggaattgcggcgcacaccggtgtccgacacatcgaaaacgtagtgcaggcgagggaatccgctggattcatccagcagagcaatgccctttgcaccccggcgcacataacggttcattcggttgttccaaacatcatagtcggcgcaggcggtggcatccgggcgctgggcgtagatcataagttggtctgtaaaagggtacttgtacagccgagatgcggttgtcaggtagtccgtccagctttcccaataccgggtcagaccattcgccgtgcgctgggcaagggcgagatattcttcggttttgcttggcattttggcctcccttcaattctgtggtaaacaaaaaagcgagcggccttttcaggtcactcgctatggaatctatggtattttattcgtgttttgcggcaaacttttctgccatctccagcagacggtcaaaggtctgcttttcttccggctcctcgatcagctttgcaagcaggacacggaacacatcggtgctgtcctgccccaacgcaactgcaactttttcaatgcagtcgtgcagcttcttgaccgcttcatcggaaggtttggatttggcaagcaggtcggacaggtagctgatgaagggataggtggaatcatcattgatgatttcgttggtctcctcgatgatcttctgattttcctctggtgaaatttcacctctctggttcaggatctcgcgagaagaagtgcgccctttcaaaaaggtggcaaaaagcaggcggtcgatgggtgatctttttgtggtatccattggctatcctccgctttcaatttttctgtgcattaaaactggctttagtatagcatgaatggaagtattctatcaagcccacttttttgcgggttatgaaaaatttttggagcaatagcttatgacactatcctagttgacaatcatcgacaaactggaagttagcgatttctttttccggtattctctgtcccacggatttcctcatgatagaaataatctacgatcaccggctgtccctgcgggactctgccataaggcatttcattatccacaaagggacaatcatacttcttagccatttccgcagcttttacttcaagtgcttcaaagtagctgcggttatgcttgttatagatctcgtcgtaaagtggtacaagatcaggatgtttttcggcgatataatccataattgtctttttgaaaccgcctcgaagattgagattttcgagccagaacagatcgcactgatcctttacccgctcaaagatggcttcaaagtccgtgataccgggaaataccggggatacgaaacagactgtacggatacctgcttcatatacctgcttcatagcagcgatacggcgctcaatgctcgaagcagagtccatatcgttcttgaaattttcatccagtgtgttgatcgaccatgaaacggttacacgtccaagcttcttcagcagatcaatatcccgtaccacaagatccgactttgtgcagatcagaatatctgcgtcactgccgatcagcagctccagaagttttctggtattcccgaattgcccctcctgtggattgtagccatctgtcacagaaccgatgaccacccgctgtccggcatatttcttcggatttttaattttcggccaatgcttcacatcaaggaaagtgccccattcctccgtgtgtccggtaaagcgcttcataaaagaagcatagcaatacttgcaggcatgtgtacagcccacatagggattgaccgagtaaccgcctaccggcagactagacttagtcatgatgttctttgtttccacctcacgaatgaggattccatttattacttcttccatgatttctgtacctctaacactttattaaattcttccggcatttcctgaatcatattttcatcccctatgatagggacaaggtcttctttcataaacaccggaatgccgagcttatctgcctggtctgtcagagaccatgcccattccggctccgtatgaatctttctgctctgagccccggtcatggtgcccacaacgatccagttgattccggaaaggtcaactgtgccgggatcgtcgaataacggttcaaaggtaacatggtaatgttttgccctgatgtttttccgaagggcatcaatacgccacagttctgctttcctcgtcaccgtaacgccaaaccatgcgttttccagattggtatcaaaatccagcagatcggggcgcttggtcagaaacagaaactgatgctgtggattttcacggatctttgcaaatacctcgtctctccattccggcttccatccggagagatcgctcatgccggtaagaagaaagttctgcggacgtttcttttccatcatcttgagcttacccggaaagaattcagggtcaacgaaatcatcaatcatatgccagcgtttcacgttgttgcgggcatagcaatatgtacaccccactgtgcagccaatgacgatattcatgttttgaatctgctctttgatacaaatactcatgattcctgccaaccctcaagattctttctgatacggtcgaggtattcctcaaactgggcaatttcttcttctgaaaaacctttgtagtaaatacttcccatctcgtcagatacagaatcatactcgccctttaaggaatgtgctttctcagtcagaaacaagagtgttttccttttatccgtttcagactgaacacgtcttatcagcccttgattttccattttttccagcatcgtcgtaagagatgttatcgctaatccgcatttgaccgagagtgatctgattgagataccattctcctgccacagcacataaagaatacgcccttgagctccattaaacgcatcaatatttttttcgctgagaattttttcaaaaatccggtctccaagttgttttattttggtgacaagaaatccgccatttgttttcatgcaaaagctcctatatagtagtttttaaataatactatataggagttttactgtcaagagtttgtatgttccgagttgtcgagttcaatataccataccaaatagcattgtaatagcgcttatgtacgccgcccgcaggcggcaaaattcagtcgagcggaaattccaactcggcaaactctgcatcggtcagcagtttcagcttctcgataacgccctccgacagctcccgcagggcggtttcgtcgggcatcaggtagcactgcatcagtcgcaactcctgcaccagccccagtcgggtgccggtgttgtagagcatcatcagcatgagttcttcatggttaaagttcatgttcagccctcgctttccggcagatggtgggattgcactccggggcatcgcacttctctttgagagtttgcaaaaccgaggtacgttccggctttttatccagaaaccccggcagttcctcgaagccgatgctgtccacataatgcgccgagattttcccatcctgattcagcatgatcacatcgctgaccgacaggctgtgcccatggtaatccgtcgggcgagcgaagttgaatttctggtacagttgttccaacagctccgcctgcggaacactgcgctttccttccgggaggttgccccggtgcaggatctcgtaattctcaatggacggagcgatgtttttcttttccagataacgcatggcggcaaagcggagtgcagggtctgcatcctgttgcagctgcatgaccagatagcagtcgtgcccgctctgctggaattgcttcatacggtatgactgtatctcatttcggtctgcgagtttctgggtaaactcctcttgcgtgagcgggatgcagtccttgttccgtaggttgtgggtgtacatgatttcgtcccgcacttcttcgatcatcagttcgggtgcgtcgattttcccacgctccaacaggcagcagtcgccctgatagagggcataattccacgagccattatctgcctgtacggtgagataatagtcgtattccagattccacgcccggcagtcctgctgcgtcagcggctccggttccacaatggcacggctgcgcgccatgcgctctgcaaattcacagatgtgctgcaccgaggacccgatcttcatgtggtagtcatcgagatattcgaccttctcggaacgctggtgcccatccgggtaggtcatctgcacaacgccgccgtccggcacccggaacagctcgttgtacatcgggtcaatgaaccgcacatcattctccggcaaagaacgtggagccagattccggcgtttgcgaaccccggagcgaaacttttccaaggtggtgacggcaacattctgaatcctccccacaggctcatccggatgctctgccagatagtaagcacgggcggtctcgatgcgacgctgagtgttgcccagagcttcccgtggaatctgcccttcctccaccgggagcgggctgtttttgtcaaagacctcgtacccgacccctgcgagattttcccgcagatgcagatacgtttgctcgttgaggaggtagaccgcctcgttgtcctttattacagcgtcatccttcatcagcaaccaccctcaaaatccagactgaatttgctacggccatcgacctcggtgcccagcagcacggtggcattgtaggtcttgcccttggcgctcttgcagtccttcaggcggacccggccatcccgcagcagcttgtccgccacatgagcatccagccgcttgcccagacgcttgaagaacgcattgtccttccacagtacgaaacggcaagggttggattcgcagaaccagcccttttcacgctccacaacatttgcaccgcagttcgggcagacaccaatgattttgtttttcataagcgcattcactccttttttcattttcgtgttctttaccagttcggtaatcatcgtattgatttcggtcataaattcactcggctccatttcgccacgttcgatttgcagcagctttgtttcccaatcggcggtcatttccggggattggatttcttcggacatcacggtgatgagggcttttcccttatccgtgggcagcagcaccttggttttcttggtgcccttgcgctccagaaagcccttctgcaccagtttttcaatggtggcagctctggttgccggggtgccgatgccctgacgttccacaccctccggcatactgtctgcactggcagtttccatagcgtgcagcagggtgtcctcggtaaaatgcttcggcggtgaggtctgcccttctttcagttcggcgttaagaatgccgcactcgttttctgcagcattgggtagggctgtgagttcctgcttccggttcaggatgtctgccagcaccttgcgctccaccgctttccagccttcttccagaatctccttgctcttggcagtaaattcctccccggcacattcggtggtcagcagggtttccagataccggaagggcttgctcaccgccatcagcgttcgggcgatgatgagcttcaggacattctgctcccccttgggcaatgcgtccagatcggcttgcagcatactgcgagtgggcaggatagcgtggtggtcggtgactttttcccggttgacagtgcgccgtgtccggggcacagcctcgtccacatcttccggggtaatgtcgaaaaatctttccagtgcctcggtcagttcctccagcatttcctcgtcatcgtcggtgatatagcagctatcagttcggggataagtggtaagtttcttctcatacaggctctgcacatagtccaaagtctgctgtgcgctgtaccccagcaagcggttagcatcccgctgaagggtggtcagatcgtacagcgacggtggattctcggacttttccttgcgggtgatgcgctggatcgttgctaccatctcctttcggcaggcttccagcaggttttcggcaacggatttttcgggaatgcggcggctggatgccgtgcatccgctggtcagttcaagttctacggtgtagaactttttcggcacaaaggcggcaatggcggcttcccgcaccaccgtcatggcaagcaccggggtcataacacgccccaccgccagcggctggttgtacaggcacgaaaaaagccgggacgcattgatgccgaccatccagtcggcacgttcccggcagagtgctgcgttgtacagcgcatcgtattcagttgacggtttcaggcgggcgaacccttctcggatagcggattcttccatgctggacagccacaggcgggaaaaaggctttttgcaccccgcttgctggtagacaagtcggaagatcaattctccctcccgtccggaatcgcaactgttcacaatgctctccacatccgggcggtgcatcagcttttgcaaaatgccaaactgctttttggtggacgcagacaccagatactgccacttttgcggcaggatgggcaagtctgcgatactccacttgacgtacttggcatcgtagacatttggcggagcaagttccaccagatgaccaacgcaccagctgacgagatagccgttgccctcaaggtagccgtcctgacggctggtggcaccaaggacttttgcataggacatagcgacggatggcttttccgccacgactaattttgcgataagaatccctccaatctgtttctgattgcaatatgtacggcggcaaaacgccgccttgaaatcagatgggttcggtgtcctgctcgtccggggtttcgtcctcgtccggcacatcggtcggaatctcaaaatcgcccttgtcctcggtgtagtttgcatcagggtcgagggcttctttttctgcctgctttttctgcttctgcttcgcaaaaacgtagaagccgccgcctgccgccagcgcgatcagcacgaccacgcccagaaagccggacgcgatctttgtgaccttgttttccttaggctgttccgtgccggatgctgccgcttcttccgcagctttcttggcttcttcctcggctttcagcctgtcctgttcagcctgcgccactgcttctttttcggcggtgtaggcatcggcggcatcttcttccatcagagccaaaaggtcggcttcgtccaccagattcataaagtggacggtctgctgccctttggcgttgcggtcaatgaccagataaaaggttgcacccgacttcgacaccagcgtgatgaactgctgtccgctgccatcggaatagtcggtgtggtaatcatccaccagcgtcaggttgccctccggggtcagggcaccagcggtttcatccgtgactgtgacaacatcttcctccacgacttccggcagaaccggctgctccaccggggcagcttcgccctcaaaggcaaaggcgggagccgccatgccagcgcacagtgccgccgataccagcagcgcacccagtttcttaatcttcatctgcatcgacctccttctcaaaagttgcacccacggcagacagcgcagccgggttcggggtggcggtagccgactgccgcagcagggcggcaagctgttccggcgtgacctttgcagtccgcaccatctcgttgacctcggcggaatcctcctcctgaatgcgccgctccaaaatctcgatacgattattcagtttgatgcggcgctccttctcttttgccaacatcgcccgcagcttatccgatttttcgctcatagtaattcctccaatcattttgaaagccgtccgaacccggcgagatgcttctcccagtaggacgagtgaatgtttgcgtacttgatggggtcgccggcactgaccatcatgccgttgccgagatacagcccgacatggcttttcccaggcgtatcatacgttccatcgaagaaaacaaggtcaccgggctttgcttcggcttcggaaatgtgctggcttttctgccaaagaccgttggctgtggtgcgccccacatcatagccgttctggttgtagacccaacaaacgtagcctgaacagtcaaagccagtttccggggtggagccgccccacacatagggtgtgcccacatacttttgggcttccttgtagatggcggcgaactcgctgtccgtcaaggcttctgccggaacctgatagtcgatgcccggtgtgccggagccgtcagaaccaccgggcggcagaccgccgttgaacagataaggccgaccacccagcgtgtcctgaaaaatctcgtaacgtttccattggtcgttattcagttcttcccgaatgaccacttccaagccacggttcaccagcttggtgtggaagatgcggtactcatagggcacctgcgtagggactgggattcctgcgggagtcatgacccacacagtcatataccgggtctgcacctctacccatgtggtcagcttgtactgcttcttgagggtctccttcaacttgctctgcacctccgaccgggtgtaatcgtcatacagggtcgtgagaaaagaagtcaactgccacgggtcatgctcgatggggtcaaggtggtactggtactcgttgtagccggggtggtcggtgggagtgcgcttgatctttttgtccagttccttctccagtttcttgtagtcctgttctgcaccccggatatcccggtcctcggcagagtacatggtctgcccggacacctgtgtgccgccggaaaagaggatgccgcaggaggaaaagccggacatcaccatgaggatgagcaaaagaaaaacgcccacgattaccagaacgtgtgcgttgcccttggcggcattcatcagccctttcacagcggtgctgacggcagttttgcctttctccaccgcctgttccacgccggaccgggcagcagatgcaccgttggataccgccttaccgcctgcggtctgagccgccgtgcccgaccgggcggcggcatagtagcttttgtgaatttcttgccgctgtttccagcgtgaaagccagttggagccaccttcaccggtgctggatgctcctgcatcttgtgccgcagtcggttcctgtgcagaaaatcttgcggttttggtgtctttctttccctgtgccttggctttcttcttgagtttgcgggcatagcggcttttggaaatatcacggacatttcctgccgccttttcgccctcgctcagagcctgtgtgcccacattgtcatcctcgtattggtcaacctcccggtgcaccgcagagcgggcggcatgggcggcgtacatttcacgcttctgcgccttgcttaaccggctcaactcgtccggggtcagttccgccttgccaaaccgcagatgctgtgccttttccgcagctttatctgcatcggttttcagctttttctttttgggcaccgtctgctctaccttggcttttttcgggggagaacgggtcttttttgcggacgtttcctctttggtgttcagcttcggttcactcatttctgcacgccctccgagatctcgttgagtttagtcgtgaggatacggtagagttcaaggtctttcgggaagtggtcaacaaagggcaggatcacgttgccgaagaacagcagcccttcaccttcgccggagtgggtcacataggaaagctgatggggcgagatgttgagctgctttgcgagaatctgtcggtctccgttggcctgattgagcatatacacaaagtccgagttctcgaaaatgttcgatacttcggggcttgccagcagatctttgacgttctgcgttagggctgtcgggatgccgccccacttacggaaacgcttccaaatctccacagaataagcggcagtctgttcctctttcagcaaaaggtggaactcgtctgcatagtaccgggtggattttccggcactgcggttggcggtaacgcgcccccacacggcatcctgcacgatgagcattcccagctttttcagctgcttgcccagctgcttgatgtcgaagcagacgatgcggttgtggatgtccacgttggtgtggtggttgaagatgttcaaagaacccttgacgtaaatctccaatgccgccgccacatggcgggcttccggttcgtcctgcgtcagcagagcgttgtacagatcttccagcaggggcatattttccggggtgggattctcgaaatacttgcggtagaccacatgaacacagcggtcaatgaccgtcttttccacaggttgcaagccctcttttccgcctaccaccagttcacacagcgaaagaataaagtccgctttcagagccagcggattgtcctcctcgctgtaattgctgttgatgtccatggggttgatatactgagtgctggtagggccgatgtggataacctgcccatgcagacgctccaccagcggagcgtattctgcttccgggtcgcagatgataatatcatcatccgtcaccagaaaagcgttggtgatttcacgctttgccgagaaacttttgcccgaaccgggagtgccgaggataagcccattgggatttttcagctttttgcgatccaccataatcaggttgttggacagggcattcagcccgtaatacaggctttctttgccagactggtacagttcctgtgtggtgaacggaatgaagatggcggtactgctggtggtcagaccgcgctgaatctcgatctggcagtctgccagcggaagcgaggacatcagcccctgctcctgctggaaatccaaccggcacaggttgcagttgtgcttctgtgcaatgctggatgcctgaaaaacattgttttccaactcctgctccgtgcgtccggtgttcagcaccagaaaggtgacaaggaacatccgttcgttctggctctgcaattccttcaaaagtgcctttgcatcccgaccgtaggtcgccaaatccgacggaatgatgtcaatatcatatccggcacggattgccttcttctgttcctcgatcttgctgcgatccagttccgtgatggtgcgcttgaccgtcttgatggcacgattctgatcgacactctgaatgtgcatggtaacaatctgcgaggaatccatatccagaaagtccttcagaagctggtcgctgatgtcggatgccgtgatgctcagaaagctggcagcgcaaaagatgccgcccatttggaacgtccgggaatttttgaaggcaaaggcggtgggtgcaatggcatccttcaccgaaaggccgcttttcacaaggtctttccagtcaaagtgaaatttggatgcgccgtccatgttgaacatatcgtgcatgagtttcagccgctggacaccgttcaggggctttgcctgcacccccagtcggtgaaagttgttgagcaaatcgttttggatgtggtcgagccggggcttgacctgcgccatgctttcaccctccacaccaaaggtgatgaacttggtcttagtcagaccattattgcccttggcaagctgctgacgcagcatttgagaatactcggcgcgaacatcgtcaaagccatctttctggtacgggatgcggatgctcttctcaaactctgtgctgtccgttgccatgttcacaaaggacagttcaaacttgatggaactgtcgaaaaaattgaggaatgaacaccattcctcaaaaatcgcagtcttatcctcctgctgcgccaactgataattgatatcctgataggcaatcgtccgagtataatagttcggcttcacccggcaagtgccatcctcgaacatccgctgcatggggatggactgctgtgctgtccggggnnnnnnnnnnagacttcggcggctttttcttgccgcccttatcggtctttttccaaaacggcattggctgaccctcctctcatcaaaatcgcgtagtagttgttggtcttataaggtcgaatcttcgggcgcaagaatcgcgcctgaacatagtgcgacagcagtttttccagcggctgaccatttttctcgtacatacccagaaaaaatgcaggcagcataacggccatcatgccaagggtggcggctgtgctgccgccggaatcccggagaacgaaaaacagcggcactccaatcagtgccgccgtgccgaaacaaagcagttgccgtttcgtcaggttgaacgcgaccttcgattttactttcgtcaggtcacggggaacggaaatatacgcagccaataaagcaactcctttaatgcgctccgagaacggatttcgtcacggagctggtcttaaacaggctgaaacaaagcaggacggtatagcccacgatactccaaatggagttgatggcatccccggaaatcgctaccgactgtatcagcacggcgtaaatcgccacacagatgaggatgagaaagccctgaaaacccagcgcaaacaggcatttcaggtagttctgccccatgtggctctgctcatggttgccgaaagtcgccatggggatgggcgcaaggctcaccatgcagtagatctcgatcatacgcccgtagacaatgacaaaaatgatgatgctcaagatccgcatggtgatgccgatgaagaaggactgcaaaaacagcccgaacaggggtcctacatccatctgcatcaggctggcttccaacatcgacaagccaatgtcgttgacacgggtgtttccggcgatgatgccgctggaatcggacaccaccttctgggtgatgtcgaacactgccatcacaatatcgaaggtgttgctgatgagccacaccgacaccgccgttttgaagatccagcgcatgatgagcgcaggctcaaactgcgccatgttgttgtgctgggtgatcatttcaatcaactcataacaggcgatgaaggtcaggatgatgcccgcaatgggcagcaccacgttccgggaaagggcttcgatcatggcgaacactcttggctcaaagctggagggcttggtgcccacctgctgggcaatgtttcctacctgcgtgttcacatcgtcgaacagaccggaaaggtttgacataatgcctgccgtcaggatgcctttgatccagtcggcaatggctttgagaacggtttccattcagcagtcaccgtccttagctgaagtggttgataagggtcttgagaagattcaggagaaaaataatgtgggtcaaaaactgcataagacaccgcctttcattgatgggtggataaaaaacacggcttggagtacggacattcaataaaactgcaagctgcagagggctcctttgttgctcaagccgccgtatggaataatcgactcagaagccgatgaaaacaaaaatgccgactgcttttggcaatcggcaatggcaataatatttatacaagttcttcccaaggctctagtcccatttcttcccatgtgacaccataaggggcaccgccagaagtataaccagcaataaagaagaaatcatcattctgttccacgagtggctcgaacacctgtttctttttcttctttctgtggggctttgtcatttttacagcaggacgattcagtttttcctgtctgcgttcctcacgatgaagcagatgttccggcaatcctttttctgcgagacgctgttcaatagcggaatgctttttattatatacggcatagaactcatcgaaggaaacatggtatggaatgtgcgaaaaaatttgacgagcaagcaactcatgttcatccggggtatcaggaaaccgttgattatcggaaaagaactgatgaagttccttatacatctgctctacaactttagccttctgtttctgcttgagctgtttgtaaggcttgtaatcgttcattcactatgctcctagcggtaagaaagtgggaatcaagcaagcatcttgccctccagataggagcagcggagataatcaggattagtgtagtatacattggaattgaaatcggatatctcatccgtgataaacgacgaaaaaacatccagaattgcctgtgcagcatcctcatccttcatggtggacagcaccagcccctggtacagcattccgatggaggttgcagaaggaaccgtatagcggcactctgcggcggtatcaaaatccccatccgggatgttgaaatcttcaatcagctcatccgaaacctgctcaaaggacaggcagtggtttacttctgccagccggagctgccgttcgatggcggcttttgtgaagtgacgaatcacatcctgccgatgatttttggtcttgcgggcaatggtctcgatcaggctgcaaacatagagaacatcatttttctgcttttcggtcatggatgggctcactcctctcaaaggtcaggcagtgcaaagcgtttacggtgtgaaagctgatctggtgtgttggatgcttgaacttcgccaaggcccaaaatgcttcacggctgatctgcccggacgtaaatccgttgacgtaatcccaaatggtgtcgtctgccatgggtccctccacaatatcgtagggatgggtttcgcctgcacgacattttgcaataaaatccagccattcgtccgacatttcagggaaacgcagaatcttcaggtcgggattttctacatagcgatagacattcacaaggccatcggcagaacggcggtctgcccagcggtaggcttgctgatagttgttcgtgcagtagaatccccaagaaaagtcctttgtataccgtgtgatgcggatttcgggatagacaactgcttctttactgccatgatacaataaaatctcgctcatctgcttcaccttctgtatgtgagatcgttactatggctttccttattataatatgtaccgggcggcaaccgccgcccgctgttcttaaccgaacagaccgctcagcaggggaatcagggtaatgccgaccaacgcaacgccgccgccagccatgagctgcttcatgccctgactcttactgccggggttgtcgttaccataaccttccagcaggttgatggcaccccacacgccgagaccggcacccagagctacgaccagagtctgaagaacttcgatagcagagttgaagaattccatagtcttttctcctttattataaagcgtttccggtcatttgtacacacccgaaatcttgtagttttacgctgcataaccgcagcaaggctgattttctggtgcacctttctagccgggataaaaataaaaccgcctaccggatcaggcagacgggagcgaatcagcgtcaatcacaacaaattcatcattggaattgattttttcttttcggttcagatatttttcaatatcgaaggtgtttttggggtcgtagtccgaggtcaacttgtagttggggtgctgggtcaggtcgtacttgtcagaaagaaacggtctgacgccacgcaactgcaaaatacacttgccgccgtccagcaccgccagctcgtcccggctcaataattcatgccccatcttctggaacgtagtgccgtaactggggctgttgccacgggtgtccgaggtgttgaaggcgtcgatggtttccttgcccagcatttccgacagttctttcagggtagtcggctcactgccgccgagaaaaatctggctgtccatgttgcctacaatggtatctgcgttgtccttgtagatggctttcaactgacttctcgcctgcaaaacaaggcaggcggagatctcacggctgcggatggtggctaccagcttttccagattggggatctgcccgatgttggcgcactcgtcgatcaggcaccgcacatggacaggcagcttgccgccgtattggtcatccgccttatcacagagcagattgaaaagctgggtgtagaccatcgaaatcagaaaattgaaggtgctgtccgtatccgacatgatgaggaacagagctgttttcttatcacccagcgtgtccagttgcagttcatcgtacatggtgaggtcccgcagttcttggatgtcgaagggggctaatctggcaccgcaggaaatgaggatggatttcgcagtcttaccagagacaagttgtcaaggactttttcatcaaattcacaaaaaatctaaaaaaaggtgccagaagcactgtatggctcctgacacctcgtttaacagcttacatttttccgttcagcaggtctttgcagagatacgcatagtctggcagctggttgatatatggctcccagcgccgcttgatttcggccaattccagcggatcggctgcttccagtgcatgatcgttgcctgtcatatataaaacatccgtagcaacatcatccaaacacctgccgcagagatcagcggctgattcgattctgataccggtatccacatagactggattgacgccaatcgtcagccagacatagcctaccttgtccgaccagagcagttcaaaatcagggctttgccgcagatgttccgcaaagacttcctttactcgctcaatttcatgtttctctttttctgtgtaaagcattttcgtgtcctccttgacaaaaaatttagtgcgtaccattatcagtttagcacaaggcggcttcgtttatcagtctgtcacatctgctgaatttcatttttgagcatacgcttgattttatcgctcatggtttctgtgctggtctggctgaaatggacatgaaccttgtaggttgtcttgccgattttctttaccatcgctggcgtgttttccggcgctctggacgcagtaacggcgtctgccacctgcatagtatggggttctttgttcatggcgctcctttctccgaacgggtctgtgccgccggtaaaaaatcagtcgtgcttactgtttacaatgtcttttgctgtctgtcgggtagcaccggcattttcttcccggaaattcttcccgtcaaagagaatcggcgcgcaccgttccaaaatacggtcatagatacgagcgtgggccaggtcaggcgggtttttgagttcggccagcttcaggttggtggtgatgatcatgggcctgcggctgcgatagcggctgtcaatgacgaaaaatatctgctccatagtatattcggtactgcgctctacacccaaatcgtcaatgataagcaggtcatactcgtcaaagctggcaataaactccgacctgtcctcagagaacatcccggtcaggcggttcagaatggtggggaagttcgtcatcagcaccggcacatcctggtcaagcaaagcgttggcaatacatccggcgaagaaagacttgccggttcccacatctccaaacagcaaaagcccgatattgctcttatatgcctccttccagttctccacgtaggcgcgggccttgtccatcagaggattttggccgttgtcgttagcaaaggtgtagtcgtacagatagcggtcttgcaggccctgggccttccggtgcttgatgcgctccatgcggcgctgccgttcttcagcagccttgcgctgctcctcagcctcccgctggcactggcagatgcagcgcggcataaagtagccggatttcccaaagcatggcacaacggtctgcctctggccaccgcatttcttacagtgaatgagaccgtctgacgggtctatatactcgtccccggccaattccacaccggcagctgccttgtcgatcagcgcccggatttctgcggtaatctcaatcatacagtttcatcctcctttacgctgtaatcccggttgcgtgagggtgtgacagtttttttagcgtcctcaccggcccagcgccggatggtggcggcatggctctgataccgcttgccggtagaagccatgtactcggacagtttttcgatgtactggccccatacagtgggaaagctggcctgcaagtctgccatttcctcgtccgtcaggaaaacattctggtaacggccataggcgcgggcggagcgtcccttctctatctctttctctaactctatctctatctctggtggacgaatgtcggacaaatgtccgccgtttgtccggggcgcggaaagagccttattttggagtctcgcagcccgctttcgctcagcctcggtagaggactggccgattaaaagttcgatgttgctcatgtagaatgtgccgctgtccagcacttccacaagacccagcttcaaaaagatctgcaaggctctctccacagtgccgatctgctggcgggtaatggtggcgatcatctgcgccgtgtaaggaatgtcctcgtcaagttgaagccgtccaccatgtttcagcgatttcagatacagcttgagcagaatgttggaatatagcacaccatcctgcatactttccagcagcacgatggaatcatcgtcaaaatagttttctttgagtttcaggtaataatattttcggttgtctgacatagggttcctccttggggtttctcttgggattctgtacgcattttaaggccgttttaggggtcagaggataaatctatcagcctgcctttgacaccctcgaaaaaatccttgatttacaagggtttttcagcccctaaagcgtgacatttctcccgttgtttccgcttgcgctttgcggcgttgatccgcttcatgcgagtggaacattccgggcagtatttggccctgttagaaccgggggtaaacagcgccccgcatacggcgcatttcttcgcattcagccggtggaacagcgccgtttccagttccttatcctgcggcaataccgccgtccgaaaccacctgcacaacagggagtaggaaatagactggacacagacacattcctccccatcgtccagggcgatacaatttccgtcgatgtagttgcagcactcatgcaccagcctccgcgctctgcggtactggcggtaatccatgacggggataggttcagtcttgtcgttcttcataaatgatttctctcacaaagcaggtaacctccttgaatgaatttattgttaaatattcgtgcaaagtattgctttcttcgtgcaaatggcatatactataattgccagcagaaaggggttgatcgtatggctggaaataccacaaacatcagtatccgcatggacgcagatttgaaagcacaggcggacgcactgtttactgaacttggcatgaacctgactacggcgtttaacatctttgtgcgccagtcgcttcgtgaaggcggtattccctttgaagtaaggctggaacagccgaacaaagaaacggttgctgccatgctggaagcggaaaggattgcaaaagacccgtctgtaaagggctacaatgaccttgacgagttgtttgctgacctgaaaagatgaaagaaaccaaatataccgtcaagtacacgaccagtttcaaaaaggactacaaacgagctataaagcgtggcttgaaaattgagctgttggagcaggtcgtagcattgctggcaatgggcgaaccgctgccagataagaaccgtgaccatgacctgaccggcgattgggtggggcatcgggaatgccacattctcccggactggctgctcatttaccgtatcgaggatgatgtgctggtgctgacgcttgcccgcaccgggtcgcacagcgacttgttcggcaaataaaccatctgccgccgtatgggaaaacctgtacggcggtttttctgtgtgcaaaagggtgtcgtgaaacgcgacgcacctgaaaggggtcggcaaagcgccgtaccctttaccgctccggcccccggtcgcggggcttgtcccgttcctgccgggccagttggtcggtggccttgcggagccgttccacagcttttagctcctcccgcatagctttcatgtcgatgctgtccgtctgctttccggcggtcagctggtcgatctcccgctgccatgccttcggggtgattgcctcgccgttgtctttcaagtctttcagataccgggtcgctgcgtcatacagaatcagttcccggctgtggcgctgttcaaactgttcccgcttttccggctttactttggcaagctgtttgtggatggacttgtactggttgtactgttcccacatctccccgcgttcggtaagaatggcgatccggcgctcagccttgacgatctttccccgcaggtcatagtaacggctgttcatatcagcgattttttcatgaagctgctgcatagactggatgccgtttgcctgcaaaaagctgaatagtgtagcgctttcctgcaaagcccggattttgccggtgcgggtgcggggagcgttcaactgctgctgagcctcccacaaagctgtcaagctgctttgctgtgtttgtggtttttccgtttcggctttcgaccagcgataaagacgggtaatgcgggctttgatttctttcagcagtttgttgtcggcggcgatctgccggtttacctctcccttgtcggtgcggatgccgcgcttttccatttggctggcggctggccccagatggacagagggaatcttatcaatgccctgccgcttgtagctgcgatggtcaatgcgctccggtctgccggcagattccaacgcccgattggtgtaggccgcccacgctgcccgccaaatctccacattttctttatcgttccagtcggtcgtatcctctctgtgatttttccaaccgcctttcccatccgggatacgctgtccattctcgtccagatcgtatgccttgcggcactttgcgccccactgtccattttctttcaaaggccggagcgtcagcatgatatggacatgaggattgccggttcccttgtcatggatagcaaagtcggcacacattcctttgtctacaaagttgtccttcacataggcgcgcacaagggcaagctgctgttcgccggacagttcacggggcagggctgcttcaatctcgcgggcaagctggctgtccctggctttctcgatctgctccacgctgttccagaggatagatcggtctgcaaattccggcggcgcgtgggcaggcagcatgatctccgcatggacaatgccgcctttccgggtgtagtcgtgggtcattccgtcccattcatttgtcagcttggttccgctgcggtaagcagctgcggcaacggcagaacggcctgcgctgcgcttgatgatactgacggggatatgacagaaatctatggggaacacctcctttcagtgaggggataacaggctctgtggagccggacaaacgcaaagcgggtgtttggctgcgcagagcgcacaaggggtttggggagcgtagcttcccatcgcggacgaagtacgcaacgcccccggcagggcgcacagcaccggcaacggtgtataagtgcgcccttgtaaacaagggacttatggcgtgtccccggattttggcaggtttgcagtcaattccgcagcccccggaagatgggacagggcaatcaaaaatgctttaacctctgcgccggaaaggtcgggagccaacgggaaaatcccctccaaaacggctctgcgctcaatcaagcggcgggtgcgggccttgcgttcctcgttccgctgcttgttctccaaaatcttctttcggttttcaagctgccggatctccttcaggactttctcccgttcttctttttgggggtgtgctgtaattttttcgtttatgtcatgcacctcttttctttggaaacgctcatagattgaccgtccatttctgacgcgcaaagtaccggcgcagcctccgcagtgcggcatggatggattttcccgcctgtgatggtgtgataccctccattgcggcaatgtctttcactttcatacccagcatatagcgggcgtggacacggcgagcctgcataggcggcagggaagaaatggcttcgtacaatcgccgtatcagttcttcgtattcggctaattcttctttttctatcaggtagtcctccggcgatggctgcgcccagccgatggcggcattttcgattccatcgttacaatcgagggaataaaacgccttataccggaacatcttgcgatctctggcggcctcggctctcttatccagaagaaacgcttcgacgatctcatcggacacctccacaaaaatatcctctttgcaaaatggataatattgtttgagattgatggtctgcataggcacgccctcactctgtttggaaaaagccatcatagcagcggcgcatattccgcagcccccggtggatggcaacgctgaccttgctgctgtggacgccctctctccgggagatttccggctgcttgataccggcaatgtagtaggcgtgaacacggcgggcctgtgtcggagtggcatgagccaaagccaccggcagggccgcaatcaggcgcaggcgggtggccatttcttctcgttccagcaaaatatcttccggcgatctgctgtgttccagtgcgtaattttccagccagctgtatgcgtccagagagtagtaggcgcggtggtagactgtccggcgctcgtagttgttcacctcgcgctgggcctgccgtatggcctcccatacctcgtctgtaacatccacaaactcgtcatgccggtagtggggatacatccaccgcagattgattgttttcataggcttacctcctgaaaatcggagaggcgggcagcttgtccgctgtccgcccctcgctgggataagggaaaatccctttcacttggtagccagaaaacaggtcattcgttaagcctgttctcaaagaaatttataaatttttttctaaccgcctccacactttgatacacagccactttggagcagccgcacagcactccgatctctgcaaggctcagcccgtcaagcgcatagagcaggaaccggcggcgctgggcctcggtacaggtgtccagaacagccatcagctcatgcagcgtttccatgcggcaaagatattcttccggcgtttctccgtaggctcctacgccttcggtggtaatgatgtactcgtcaaactcccggccatcccaatgccgccgctgctcatggaacaggttctccgttttgtgatcggctcggtcaagaaattcatagacttccagcgtgacctccacggccacagcttgtccgttataattgatggtaacttccatctgcctttcctccattcagattttttgggtaaatctgaatggggcggcggggagcggcaccggggataaagttcgggccatgctgacccgatgttccggctccacagggacaaaaaagcgcccggacggcataaagccatacgagcgtaatggaatatattttgctgtttggttacatggtatagtgcatactgctggccgcattgctccgctgctggaaacaggctttttttagctggtgcaggtcatgggtactgtgaaaaaagacaagaatagacacggcggcaatcctcctatatgccgccgtggatttacacggtgttaggtcgtcgttggtttaggatagacgaaaagaaacggcggctctgaaaatcaaagccgccgcttcataggcgcgtggaaatgtgtctgctttacgacggctttttttcttttgccgtcgtccggcagatgtatgaatctataggtattttctattcaatcttttttcttttttcttgataaatatgaaacgctgctactccagtcgctgccaactgaaccagaattagaacagcaaacagaccgaagctctcataatagaacagctcatccctaaatagaaggacatcacagagcgcagtcaaggtaagtgtcacaaagtaaatgatataatcccgcaggtttctgcggatattttgaattgctaacttccagtacatatcccatcaccttccgctgttggagttgttgcgaatcgaacgctggaacagcagccatgtactgagaaaatagcaactcagcagcaaagcgaaaatcccgacaatgatacctatttgccgcatcaaggctccgcagccaatataagctgagatttcagcagaaacactttgaagaaaatagccaatcacaataattgctacaacgattgccgctgtgatcggcatcccaaaccaaacaccaagctgttttagaaccaaagtatgcaggtccttctcttccactcccatttttcgcagaaccgaaaatctgtagttgtttttttctgcatccaggagctgctgaagagccagcacggtaagacacatcaccatcagcacaattgcaccatagatcaaggacgcttttaggataaagttaagggcgattatacggttcacttccgtagtatggacagttgtactgtatcctgccagattgtctttatcaggatcttctggataagaacgcccaagaagctgttccagcatttctgccgttttgaagggaagcggatattgagtcatcacaaatcggttgctctgtaccggaagcaagacttgcgctatctcgtcaggtatgatatacaccacatctgtataaagattatagatggattcccccacaggctcctgaaacacggcgttctcactgagtttcagggtgcctgcgtcagtttccagtaaggtatgctcagcgatgtagttttcaatatccttctcctctgccgcacgatgccagtgggtagcaaattcatccgtttgtaagataataggttcatatcccaacattttccgaacagcgttataatccttcagtgcaatcgccaagggaggaaaatcgtactttacccgctggtaaaagtcgcttttttggggaagatattccgaaaaagtcaaatcgtcctttatcgctatgttgttttgttctatgaacgcagtaatttccccatagtctgtatccggaagattttccacttcataaacatcgttgtagcggcttgaaatttgaatatcatagactgcccgactatccaaatagcccagactccatcctgtcaaaaccggcgcaatgacaaacaagcagatagaaaaagtcagggtcacacaaatgatcgtcatcgttttcgtattggtagccagcttagaggaaagctgtccaaacagaaataaactcgtattgtgatatttgcgggacactttagattccttccagtataggagcgccgcatttgataaatacatgactgcggaaatgataaacaaaatatccgcaaccccaaacagcaaatattgattcagagttggggcatcaaatccaaggaagtaggctttttccagttctgcgatggaaaaaatcgggatagcggtcaatactgcaccagccagaagcccgcaaaggtatcgggaaaatcctatttttctgtgtaaaacagcacctgcgattgcccaaagcagcgtcagtgcagggaaaaggacattcccccaatacatgagctttacaggaagcggatgtctgggatcgaagtaaaaatgatattttacagcacctacctccagcatccacagcagcataatgccatagataatacagatcatcggcatccatctgcttttatgaagcggtttttcattctgacggtttgccgtcataagctcaataatcctgcttttgttgagaattctgacattcccgactccaaccagaatctggaaaataacaaagaagcccacggtcagcagcacggtatctggaaaaaaagaccaagaaaaagcgtagggttccccaaaagaagcaagcagcatagccgtaatgacctgagaaacgatcatccccagaaggattcccaccgacacagagaatatgagcaggaaaaaagtctctcccaaaaagagcagtcctatggttttttgctccattcccagggttgcctcaactgcaaactccgattgtttttttctcagcatgaaacgatttacatagtggatcaggaacaacaaaagcagactaatcccgcaaattgccagtttcatacctccagccagcagggaaatattatattccgcaccaatggtcggatgataatgggtgctgctgatagacaaaaacgcatagaacagggtgacacagagtgtcatggtcacaatataaatcaaatagtccttcacagaccgctttgcatttttgaaaatgagtttagcgtacatcgctcatgccccctcccatcatggtgaggacatccaggattttttcaaagaaagtcctgcgggaatcaccacccttacggatttccgtaaagatcgccccgtccctcataaagagaatacgattggcatagcttgccgagaaagcatcgtgtgtcaccatcaggatcgtggctccgagatcttcgttgatactctggatcgtcgaaagcagcatctgggacgagtgactgtctaacgcaccggtgggttcatccgccaaaatcagcttaggctggttgataatggctctggcacaggcgcaccgctgcttctggccgccggacacctgataggggtacttatccagaatatccgtgatattcagctttccggccatttcccgcacccgcccatcaatctcgcctgcgggaaccttgttgatagtcagtgccaaggcaatgttttctgagattgtcagagtgtccagcaggttaaaatcctgaaatacaaatccaagattctcccgacgaaacctggcaatctgtttttcgttgatttccgtcacatcggttccgtccagatagatatgtcccgcactgacggtatcaatggtggaaatacagttgagcagggtagtcttgccggaaccggatgctcccatgattcctacaaattctccctcttgaacggaaaagctaatgtcctgaattgcttttgtaatattcccgctatttccgtaatatttctggatatgatccagtttcaaaatttctttcattattatcacctcttgtctctattgtaggataagaacgactttgtttgtatcaagttttcttacaaagttctaacaaaaatgtaagaagtgcagaacgcttttcagttctgcacttcatgaatcagacagttaatgtgaaaagaaagggaaacggctgtgccatgttccgacgactccgccgtaatgccaatgcccagcttttcacagagccgtttgcacagatacagaccaagtcctgtggattgctgaatcagacgaccattctgaccggtaaatcccttttcaaaaatacggggcagatcggacgcagcaattccgattccattgtcctccaccacaaggacaacctgatcctgccgtttatgagtagaaatgcgaagaaccggctgttcagtacgatacttgaccgcattggcaatcagttgatttaggataaaacgcacccacttttcatctgaataaaccgtgtcctgcatttcctccacttccaggcgcataccactttggagcagcagatatttattatctgcaatcgcctgatgcaccacttgggacagtgccatttcccggacagaataatctttctctgtatgctcactgcgggcgtaataaagcgcctgttcggtaaagcggttggtcttttccagttccaacagaagttcttttgtccagtccgtccgatggttttcacataggagtttcatcgcagtaatgggcgttttgatttcgtgaatccattgctcaatgtattctttgtactccaggcgttcccgctcgatctctccaatctgttccaacatggattttccagccattttcaaaagccgatagtaaacctgatcctcagcctgttctggtagttccattacttcggaaatgaggtatctttcggaaagctgctccgccatatccagaagttttttcatctgccgtttccgtttccagtaagtgagggcaagacccgtcagcaaaatcaatgcccatacgatcaggatcaataccactgcggaaaacgaattgccgcacaccagcaaaaataccgtgagtgcagccatgcagaccaagttcgtcagcagaaatggcagcctgtttttccaatatcgtctgctgttcatatcgtgtacccctgtctgtgctttgtcttgataaaatccgtcagaccgatgcctgccagtttttcccggatgcggttgatattgacgctcaaagcattgtcatccacatataactgattgtcccacaaatactcaatcatatccccacgagaacagattttccctccgttcttgaacaggtaatagagaattttcaattcgttcttagtaagttctacgctctgtccatgatagtccaaactgctggattccagatgcagcaccgcatctccataggcgatctgttcctgctgctgtgcgggataggcttttttcagcagagacgcaattttcgcaagcaggatcgctgtgttatagggcttcgtgataaaagcgtctccgcccagcataatgctattcagctcgtccatatccgtgttgcagcttgtcacaaagatgatcggcacttcggaaaaggtacgaattttagagcataaagcaaaaccattctctccgggtaacttaatgtccaacaaaatcagatgtggcttttcatcctgaatctgttctgtcacagcagaaaaattccttactccaagcgttgtatatccatttccattcaataaagtttgtaattctccctgtatcacaggatcatcttcaattatcataattttagatagtttcatgctttctgcacctttccttgttttgtccggccatcaactggcttctccgcagttttagggatcagccaaacaccagccatcttcacagcgccgggaatgcgccctccggcgcaataataatttaccctacgaggtgtcacgccccacttttcggcggcctctttcaatgtcatatagtccatttcgcacctccacagagtacattatagttctctttctcgaacaatgcaaggaacgaaatatgaattataaacttcaaccaacctgcatataacaacattccacgggcgaagtatgaattatacaatgtaaccgggtgatgctatatggcgaaagttgaagattgtcccggttttgaaaccttcggcgcagatgtcaaagctgcacgagaggcaaagcgtctggcacgaaaaacattggcggaaatggttgggattgaatggcggtatcttgccaacattgagaatcaaggtgcgattccgagcctgcctgtgatgatccagttgattaaggtctgcggacttcccgtggaacggtattttagcccggagatcatgcgggaagaaagcgaacagcggcaacgagtcagccacaagctgaagctttgccctgaagaatacctgccgattatcgaaggtgccatagacggggcgctcaaaatggaacagactgcgaagcagaaggaggacgcataatcgcggcctccttctggcgtttctatatcaagtttcccggcacttttcccaaagttcccggcacctctgctggatttctccgttttctgtcacagtcagatcgcggtcatttccggtaatcttatcttctagaaagttggtgtatgtatccagcaaggcgtttcgcaaatcctccggagttttctgtatttcggcgctgtaccagtcattccggtgaggttcccatgccatcaatgtataaccgtggctggtctgcaccacctcatacagaggatcatcatccagatatgcctgaaacacttccagaaccttttcaaaggtcagcatttcccacacctcccattcaactgcaaatcagttccctgattaaaatttcctcaatctgtgccgttaatgtgctcatcagtcctacccagcgcataggatcacaggctttcagttcctcagtgacacccgcagcctccatcatgtgaggcaacatggtgtccacgcgctcctgcgctgtccgatcaatctctaacaggtgcggatacagtttctcgctcatcagcagttggttgtagagaataggacggtgttccttcaggtaggaccttcgcatcctgccgtacttgccgatagaagtttccggctgttcagaaagttttaggttgggtatatcataatctccacaacgaatgtaagtcaacttactcatattcatgctcctttgctccgtgatgattagactgctgcgctggctgctatgctgcctttgcgcggttcttcttttggtagctgcccgatagtagaaaaaacaccttttttcatatcctcagcccggatcagggctttcttagcgtccatttccgcttttttcttcgccttgattttgtcctcatactgtttctgtgcgccgctggctttccgcttcaaataattctgatgaagcctgtccttgcgttcttcttttttctgcagttcttcctgttcctccgaggttaaaggaaccggctgtaaggatggtgggatatagcgccctaaaaaattgaagtagatttcaatttcctgcgtggtgtcctggctgccttttcgggcgcgttcgtggacaaggattttctctacaaactcattgagcatggtgtttgtcagcgcgtcaaaattctcgtatttatcaatcagggctataaatttctccgctgatttctggctctgttcgtagccggtaacagccttttccagctccataatttcaatctcaagtgtgtcctgctctttggcatactgtgcatcaagcgccctatatcgtgcgtccggtaacttgccgagggcgttgtcctcatagattttgcaaatcagtttttccagttctccggctctcttttgagcagcggccagacgcctgcgctttttcgatatatcggcactctgttgagcaacctgcgtctcctgaacggtgtgaataaattccgtccggtcatttctggaatattcagcgatagcccggagcgtgtcggaaaccaatttcagaacagcactctcattgatacggtgttgagtgggacatagtgtcccacacggaattttggtataattggaacaggtatattgagaaatccgctttccattgttggtgcggtggacatacatcttgccgccacaatcggcacaatagagcaagcctgtgaggggagccgcttcgccccagccgtttggataacgccgtacattgctgcggattttctgtaccaaatcaaaggtctgctggtcgataatggcttcatgggtattctcaaagatcgtccattcgtcctcagaaacatagtggcttttcttgtccttaaagtgcttgcgggtcttgaaattgatggtgtgccctaaatactctcgctttttcaaaatgttcacgatggtagatgatccccatccataggggtctttgaccggctttgagcggttcacaccctcgttgaagcgggcaaggtgtacgacaggaatttcaatccggtctgcggatagtttgcaagcaatctgataaggcccatatccctccagcgtgagggaaaagatacggcgtaccacttcggcggcttcttcatctaccagccaatgctcccgtttttcgtcccataagtagccgtaaatcacggtgcctgtcaggtgcttaccactcatgccttttgacttaaacacagagcggattttccggctggtatcacgggcgtaaaattcattcatgatgttgcggaacggggtaaaatcgtcatcacctttcagactgtctacaccgtcgttgatggcaatcagacgaacaccacgctgccgcaaaacctccataacctgaccgaccttcagatagtcgcgtcctaaccggctcatgtccttgatgacgattgcctctacacgccctgcctccacttcctccatcatcgccaaaaatccggggcggtcaaaccgggtgcctgagataccgtcatctgtaaaatgcgtaggatttggcagcccgttccggcgagcaaaatcctccaacatctgtttttggttggatatggaattgctctcgccctgtaactcatcgtcccggctcaggcgctcgtacagtggggtaattttttcatttctcatggctgtacctcctgaaacaaaaatgctctaagtgattgcttcactaaccatgacaaaatcatgattaagaagtcacttagagcatatatcacctgcggccagcttgtaaagtttgtactgccgcccggtaaagctgttgggcttcttttttgccagttcttcaaacagcaagtccaccgggttctggtattcctcgtcatcctccagtacctgcatggtgttcagcatctccagcagggtagcgaagttttgttcctccaccggggcttcataatgcagataagcgatcagggcggtgagcaaaagacgctccgatttttcccagaatgggtccccgccggacccttcacccttggtgttggtcatcagggtcgtaacaagtttcagaatgtctttttcgctgtgaacataggcaaaggggttatagtgcatggactttttgaagttgatagtgttcaggatttttaccttgtagccattcttcaacatggcctgcccacattcgagaactatcgttcctttcgggtcagtgaccacataggagctgtggcattgcaggagattcggtttcagccaaaagcgcgtcttaccgctgccggagccaccgactaccaacacatttttgtttcgggcgttcttggggtcaggcgggcggttggacatcatcaggcgctccgttttcgtcaggacgatgttgtcgaaaaacttgggagccatgaacggctcaatgtccttgggtgtgccccatgaagcgttttgtcaagtgcttttttgagttattgacgcaaattatcgtgaaagtgcgaaagtgcaaagcgcaaagggtctgcgttttgcactttcagcttgcgggttcgggtggctgcttcttcttgatgaagttgtaccattgaccgccgacacgccttgcgcctaaaatgccgcccatgttgcgcttggcattctgtaccgtcctttcggatattccggcttcggttgcggcttttacaatgtcctcactggcaagctctttcccgtctgcaagcaggtcaagtatcagcctttcggcttgctcggtcttggtggcggtgttcccgcccgcgccggacagcagctcgtcagcggtgatgtcgtattcgcctatccacgaaaagcccgtttccgggtcaaggcaaaaggcaacgggcttgccctccggcgcaagggaagatttgtcatggacgataacgcgcacattcggttctcgcttcacgcgcccgataagaagcacgctccgggcggcggcgcggaagtcgatagaacctaagccccggtatgcgctctgccctccggcagctttgttgagatgtccgataaggataacggcgcacccggtacgctcggcaacatcggcaaggcggcggaacatagggcgcacttcgtttgcccggttcatgtcggtcttttcgcccatatatgcctgtatggggtcaaggataatcagccgcgccccgttctgcgtgattgccttttctatgcgctcgtcggagagggtaagttcccgtttggcttcatcaatcacaagcacccggtcaaggtctgcggcggcttctatcaagcgtggcttgacggtatcgcccagcccgtcctcggcggtctggtaaatcacttggaatggcggcaagggcttcattcccggcagcgttcccccggtggtgcaggcggcggcaaggcgcagggcaaaggtggtcttgccctcaccgggattgccttgcacaatggttactttcccaaaggggatatacggctcccatagccattcaacggtctgggtgtcaacctcgctcatgcggataatctcaacggtttcctcctgggttggctctttcaagccgtagattgcttcccgcaaatatttcccatctgtgatttctgcccggtgctgcaatacctcgttccagtccttgtaaagcggcacaaggcggtggacggtcaagccctccggcacaagctccgcaaggcggctgcaagcatcgtttccggcgttgtcgttgtcaaggcagatgtaaacagtcttgatgttcggacggtcagaaaggaaacgcaaaagggctttctcgcccacgccgcccaacgcaagatagctttgcttctgccaatcctttttgaacaggcagaggaacgataagaggtctatcggggcttcaaagacaaacaatctttcgccctcgccccggtagcagaagttaaaggctttgtcgctgcctttcacatcaagccggaagtttcccgccgttcccttgctgtgggcgtagcgcggtattccgtcctcatcccgccccacaaatacggcgttgtggtgggctgcatcctcgtaaatatcgccgctggcaaagaaaaagcccgacacatcttcatcaatgcgacgggcggctgtgaggtagttcctcgctatgcggttgtcgggattgcggggtggcaatcggaagtcagaaaaggacgcggggcttggtctgtccggcggttgggctgcgcctttttcccctgtcagcagttctatggcttcggtaaagctcttcccgaaaaactccatgacaaaatcaatgggtgcgccgcctttgctttggctgtgcctgtaccatttgtttccccggatagtcaagctgtcgtgccgtttccagcggtattcctgcccggcgcgggtaagctgctcgccctgtccttgcagaaaagaaacaaggtcggcttggttggcgcagtctatttgttcttgggtgtaatacatggttgatacctctctttctgtggttgaattgttcatagttttgaagtaaaatgaagtcaacaaattctaatttgacaaaggagtgtgattgtatgaaaaggcaactgcaaggtatagcattgattttagttagtatcctgctgatgttaggatatggcgatgtggctttttttgacttgagtttcaaatgggatttaatcttttcagttatcggcattactggcgttataatgacatttttacccgataagaagtgaacacattcctttgtcggatgggaatagaggacggacaggcaaagcagcttgcccgtccttttctttatcgctcctgttcctgccgcttggtgcggctctgcgtctgctccggttggtcggcgcggagtgcaatatccacgcacctgcggattttttgaagctcggcaacctcggcgcgggtatctttcagtttggtataatcgctgtccctttgtgttttgaggtcagcatattcctgttcccattccgcaataggcaaggtctttgttcctttcggcagatttgcatggagatagcggtttgccgcgtcccatagggtaagctcggcgcggcgagcttctgcaaacttctcctgttttcctttccagcggatttgccgatactcgtcctgtatgggcttgtaggtctgataatttctgccgtgctccaagagtttttgcagttctttcatgcgctgctcggcggttttcattccctcccggattgaataggctttatcactgacagaggaaagagaatcgtccagctcatcaagattagagataccatgctcggaaagatagttgaccgccgccgctatggttttcagttcgtcggctgcgtgttggtgctgccaactctgcgaatacttccggctcttttctctctgaacgctcaaatacttcatcagcagatttgcaaggttgggagattgcggcggctgttccggggcggtttcccgcgctttgaacaggtcggcaatccattccttgagcttcccaatctgcgcccggatttcccggataaggcggtttgccttttggatatttcggttcagttcgcctttctcggtggcgatgcctttcttctccatctggcaagccgccacgcccatgtggacggtgggtatttcgtctatgccgcgctcggcgttgctgcggtggtcgatacgctccgggcttccgtttctctccaaaaagtcgttggtaaagtcagcccacgccttgcgccacaagagggtgttgtccttgtcgttccagcctgtaaggtcaactttgtgggttttgtatctgccacttggcaagcggatacgctcgccgttctcgtcaatgtcatattcctttttggatttcgctgcccatgcgccgcgctcgtcaagggggcgcatggtaagcataatatgacaatgggggttgccgctgtcggtgtcgtgaatggcataatcaacgcacattcctctggaaacaaattgagaggaacagtattcccggacaagccggatctgttcctctctggataattctatggggagcgccgcgtcaatctctctggcaagctgggcgttcccggctttctcgtaaagctccacgctgttccacaaggttgaacggtcagagaaagagggcggggcatggggcggcagcatgatttctgtatggacaacaccgcctttgcgggtgtagtcgtgggtcattccgtcccactcgtttgtcagcttttcgccgcttcggtaggcggctgcggcaacggctgatttgccttttcctcggctcacaatgccgatgttccaatggtaaatggctatgggtatcacctcccggataggataataaaacccgcaaaaatggtacagacgccaacggcgggtgtactgtttttgtgggtgtgcagggatagccgcgaagcggcgcaaggggtgcagccccttgttgcggcaaagccgccatatcggagcgcgggataaaatccctgtgcggagacaagccctcggcagagcgcacacgcccgtaagggtgtataagtgcgcccttagttcctaagggattttcagcttgtcgctccctctgctcgttttttcagatattcccgcgctggttcactcgtcaaggcaagccggagaagcgcggcggcttcctcgtcagtcatgttctttgcttccggcacaatgctttcaaagactgcgccccnnnnnnnnnnttctttggatagcttctgacgcaacatcttttcccggttctcaaactgccggattttcttcttcccgtcctcaatctcggcagtcaattcctcgcgggttttctctcttggctttgtcatgggtggtcgctcctttctgcctgtcggcatagaaaaaggacagtcgattttctcggctgcccttgtgggtggctattcaattttagtctgctgttttcaaatatataaaatagcttgctgttccgccatagccattttcagtattccattcagctgttacttcataaatatatccgcccagtttaagagtgagtacgtttccaacaatagttacatcttcgctgtttgtagcaggctctccccaatgttcgtcactccagcactgcacacttaaaattgtatctgggtcttctgtaaatcttaatgtagctgttgtttctgttgtttcaaatggcggggacaacagatccttgcactctaacgggtgtgggctatcagctattgtgctttcagcagttccgtcaatatttgttttttgccacgaataagttcctaatactgcaccgatagcggtttcgtcactcacaacgcttaatgtgggcggttcttccaaaattatattggcagtcccagagtttagtaattcatttgcatagctgttgagtgcttcacatggctcatattttgtcttataaccgataccgtcaatgacaataaatgggttatacgccataatatctgtttgtgtaccgtctaccatagtcaaggtaaaaacaacgccttgtccatcatactctgtgtaagaattatcctcattatagacaacaacatcattcaaatattcaactaattcttggatattttcaatctcaatcgttttgtctggcggtgttaataacactttagcggaaacaatctgcgctgcgtccaaatccttatacggttttttcccctgttgtgaaaaaaatacgattaccgcgatacctactaaaatgatacaagctattgcaatcatcaatctcttttttctcatggaacaagcctcctgttcttctctgttacttgtatagacgaaaaaattgaaaggaagtttcactatctataaatatcatagcacatggttatgaataaatccacctcatttcagcctgtcagtggccttgttttctctggcagaccgccgcgcagcttcccgccgttcctcgttgtatggggcggtcagacggaaagagaagcgcccctttgcaatctcaaactccatgcagcccgtttcggggtctgcgtcggtctggcggcactggtcggggtgctgtctggcgtaggcggcaagccgcttttttaagtcggtgttgtgggtgcggatatggataagggggtctttctcgtcaaaccaaatatcggtggtcttttcctgcttcgtaagccctgttctcataaactctcctttctgcgcccctgttacgcaataggggcatttttcggctgtttttcccggctcttgacttggggaaaatgaggattttcaaatagaaaccgcccggacagggaatggttcgtcggggcggctgttatcgcaagatttctgttttttccggctcttgaccgtcagacgcggataaacgcgagctgtcggcaagcaccagtttgagcagcttgtcgcggaatgtttctgtgctgctgtgattgaaaaataactccgcaacaatggtctgcccgttcctctgggtcgtaatgatactgtcgggggtctgttctgccataggcggctcctttctttgggcgcaaaagagggatttcccgtagttcggaaaatccctcttggttgacggttattctgttttactgtgtgggctgtgcggcggctgcctgtgcctttcgccttgcccggtattcccgcgctttcatgcggtcatactcccgctgcttttcaagatttctcgcccggtattcccttgaatagttgcggtggtaggcgcggctcttttccttttttgcttcctcgatttcctcccgcatttgccggatttcctgctcggtcggctctgcaagctgtgttacttcattctcaaacttgccgatataattgaaatatatgctgatgtgctggattgcgtatctcgcccttttctggtcgcgctcatgcacttcaatccggctgataaactcgttgagaatggcgggggtaagctcggtaaaggcagcatggcgttccgtcagcttcaaaaacttctgcgcccgtcctcccgcgttctcaaaagcggatagctgctcttggagcgtggcaagctccgctttcagcgtgtagtattcttctgaatacttctgcgacatctgctcatagcggtcttgcgggatcgtgccgagggcgttgtcctcatagagcttgttcagcaccttgtcaatctgttcaaggcgcgtcgtgatttgcggaatacgcttctgctgcttcttggtctgatcggtctgctgcatggcaaggttctttttcactaatgcttcaaactccgcccgattgctgatagaatagtcctcgattttcttcagcacttccgcgatggtctgcatgagcaagtccgcgtccatgatgtgcggggaatggcatttggggttcttggcttttcccttgtggtactcgctgcaaaaagcaacgtgccgcttgccgccgttccggtaatcaatacgaatgtgcatttttgcgccgcagtccttacagaaaagtaagccggacagagggtggatttccccgtccccgttggggcgtctgacgggtgcgtttcccaaaatccgctgtacggtttcaaaatcgctgcggctgataatcggctcatgcacattttctgtgatgtgccattggctccggtctacatagtggttatgtttatcccggaaatgctttgtagtcttgaagttgactacatcgccgcaatactcctgccgtgtgaggatattggtcaaggtggctttgttccacttgcagcggttatcctcgttgagtgtcttatttttacaggttccccgcccgcggtctttcatgtagaaagtgggggtagggatttgctcctgtgtcagatatacggcgatttggttgcggttcttcccaccgataaacaggcggaaaataaggcgtacaacctcggcagcttcctcgtcgattatccaaaaatccttgttgtccgggtctttgacataaccgtaaggggcttcggtgacaatcggctttccactcatgcctttggtcttaatgcccgttttcactttcttgctgatgtcctttgcataccactccgacatgatattgataaagggcgcaaactccaatgtgtcgggcttctcgctgtcaatgccgttgttgaccgcgataaagcgcacattgttccgtctgaatatctccatcgcgtttccgacttggagatagtcacgcccccagcgggtaaggtctttcataatgcagacaccgattttcccgttttccacatcgtccatcatgcgggagtaggcagaacggtcaaaaaacctgccgctttcgtcgtcgtcgatgtagtgccggatattggttaggtgctgccctctggcatagttctccaaaaatattttttggttctgtatgctgttgctctcgccgccgtccctgtcctcgtcgcccacggaaaggcgggagtaaagggctgtaattttgctataatcagtcatgtgcataacctcctgtgcgtccatgtatgtgtcatttacacttaaaattatgcactccaccgggcagagccgtactccatgccgtgacggtacttttttgcgtttttgccacgcaaatagaccgccagccgcagccctgcgccgcagcacaaacccaccagaatatcaagcggatgcagactgggcagaggatttgcaaacgccatcgggatggtgcccatcatggacatgatcttatcgcccagttccttgccctcggaaagccgccatgcttcaccaaagttggttgccaccagtcccagcaaaatatagggcagatacagcgccagcagctttgtcagctttttcgtggtcacagtccacgctcctgttccttgtgccggactttgccggagagttctgccgctgcctgcaccagttcctgcaaccgtgccagtaccgaggggcgtttgtctttgttcagcaaagatgtcgaatactccttgaacgccgagtgaaaggcttctgcatccggggctttgaaaaagaccagataccggggcggcacttcggaggtgtccttgcggatggcatagtcgatgccgtactttttggcgtagcgttccagcccacggatgccggtcttgctgatctccacgctggatacgccccggttctgccgcaacaaggtgcggacactttgcttaccttgggatgctttggactggtacagtcgaaacgccgcctttaccgcccggaggacagtccgggcggacagctttgtggtggagatcataatgttgaatgacttctgttcgatttcttcctgcactgtcatcacctcccgtgcagcagggtgactttagcggtcatgctccgccggaggcttagtgcggggcttttctgtaggcggttcatcgggcaccggcagcaccagcagacggttgcccagcttcagaaaggcttccggctgatgaaaaagctgctcatacttctgcgccatctccggggtcagggatgcaaaatcttcctcgcccagccccacaaccagaaaggttccggcaacggcatcatacatttctccgttttcatcccgaagggcacggttcaggggcagacccatgagcttgccatcatcgttataaacgatggcaaccgggtcttcaaacgggtagcttgcgccgatggagccgcccacagcctgctgcaaggctttcaggtcgttatcgatttcgacctgctgcggatgctgtcccggtgcaattttcagcacggacagggtattttcattctgttccattatcattctcctcaaagatggtgctctcctgcccggcatgggcggcgtgcagcaaagccgccacgaagaagccgaaaatggcacccgcttcaaaaaatgcgaatccgataaaaaagttcagcatggcacacctcagtcgatgcagatgcaggttagcttgtcgcggtcgatcatcagggtgacacttttggcttccagatatttctggatggtgtacatatcacacatcgtcagggatgcgaagttgccatcctcatcgaagcggtgaaaaatgaccggaccgaccagataccgctggcccatcagcttgacgacctgtttgggattgtaacggaagcccagcggctcgttctcagagatgccgatgccctcatctgcctcatcgaagcaggcaaggatgtgcggcgcatcgtcaggacggataaccgtcaggtccagaaccggcgaggttgcggcgaaataaggctctacgctgccaagctcgtgcttcattgccatgtacatgaccgagaagaagccggtcacggcatcgtcgatatggtcgagtttcttgctcatgctgtcgatggtctttgcggtcttgaaatcaatcgtattgttcataggcgttacctcgtataataaaatagtagtatttatagaccgctctccagcggaatgctacaataagcagggattccaaaggggcgcagcacccttggcacacgactttggtacaaagtctagtgtgttacacctttccagaggtgtatacgttcctgaaatgcaaaaagccccatacccaacaccttaacggtgcggacatgggacttgatgcttcctcggcctagccgggtactccgtaaccaatcctgacaggcagttgccgtgtcatttttcgaaaactgttttacggatacccagcagtcgggaagcaaagtaggtcttgccctcaccgggattgccttgcagcacgctgagttttccaaagggcagatacggcttccaaagccattccaccggggttaactccacgtcgctcatgcggatgatcttcacggaatctttcttcgggggctctttcagcacgatgcttttgaaataattgcgcagcagcacacccacaggacaaagaaaacttctgcggcatgactatcaagggcatggtgtacgatgacaaaaaggctgcgggcgaacggcttttgctggctcggcaggagatgcctaatgccgacatgatgttgctgggcacctaccgtggctttgaactgaatattcggttcgacagctttaagaatgagcatcaggccgttcttcgggcagagttgagctacccggtatcgctgggcgatgatgcgcgcggcaatatcactcgtctggacaatgccatcgacaactttacggaccgtattgcagacgccgaaaatgctctgcaaaatctggagcagcagaaacaggctgcagaggttgaagtggcaaagcccttcgcgcaggaagaagaactggctgaaaagtctgctcgccttgccgaactgaatgctctattgaatatcaaccgtgaccgcagttcctcgcaggatgctcccgaagaagcagaggaaaccgaagcacccgcaactcgtccgtctgtgctgtctgcactggaagaaaaagccaatcagccagagcctgttaagccgttcaaaagctatctggataaggagggccgataatttgaaaaagcgggaacaccgtctctttattcgtgtgactgatgaagaacggaactgcattttagataagatgtatggcatgggcatccacagcctgagtgcctatatccgcaaaatggcattggatggctactgcctgaatctcgaccttccgcagctgcggcgcatggcttatttgctccagaattgcagcaacaacttgaatcaggtagcaaaacgcgtcaacgaaagcggcaagatctattctgccgaccttgccgatctacgcacccggctggatgaactgattgatatcggtaagcagattctttccaagctggcagagctataaaaattcccgcagttggaggactgcgggtgtacatataatgcttgacatccttgcaacgtagtagtcgatacctttataataagggcgaacagaaaggaagtgcttgatatgatgtctatgctgaagaaagttgttcttttcccgatttctctctttgtggcgtttttggctctcatggcaaagtggctgctcactttgtccagttatgtggtcgctccgctgatgctctacatcttcggctgcggcatctacaccgcctgccgtcaaacttgggatcagtttcttatcctgctggtgtccgagttcatctgcttcatcctctttttcggtgcaactgccatcaccgagggtatcgggcgttttagtgaatggcttgcagaactgtaagaaatagttttaatcctttgccgccttcgggcggcattttcattttatagggggtgattcgtgatggctgcgacacgattgatcgcattgcacaagaataagggaaagaccgttgcggcctgtttgaaaagccgcacagattatgtgcagaaccccgataagaccgagcaaggtgaattggtgagttgccacgagtgcagtcctctgacagtcgatgaagaatttatgcttaccaagcggcagtatgaacttgctaccgggcgcagacagaaaagtgacgtgattgcctatcagatccggcagtcgttcaaacccggcgagatcaccgccgaagaagccaacaaggtgggctacgaactagccatgcgctttaccaagggcaaacacgcctttgtggtggcaacgcacacggaccgtcaccacatccataaccatgtgattttcaactccaccgcattggacggttcaaaaaagttccgggattttttcttttcggcactggccgttcagcggttgagcgacttgatttgtctggagcatcagctctctgttattgaaataaagccctaccgggaacggcagaaacgtaccctctatccacccaaagaaagcaatcgtgataggctgtgtggcatcatcgacagtatccttgcagaaaagcccaaggattacgaagattttctgcaaaaactggaacaacagggttatgaggtcaagcgtggaaaatacacttccgtcaagggcgcacgacaaaaacggttcatccgattcaaaacgctgggcgcaggctatagcgaggacgaactgaaagcagtgattgcaggaaaagcagaacaccatccccaccagaagcagccgccccaagagcaaccgttccaattgctggttaacattcaggcaaagctctccgagggcaaaagcgaaggctatgcacgatgggcgaaaaaatataatctgaaagaaatgtccaagacgctgattttcttgcaggagcacaaaattggcagcacagatgaactgaatgaacgcgcagcggcggcaacagaaaaatatcaccagctgggagattccatcaaagccgccgaaacacggatggcggaaattgctgtgctgaaaacgcacatcgtcaattacgccaagacccacccagtctacgatgcctaccggaaagcgggatatagcaaaaagtttctggatactcaccgggaagaaatcacactgcacaaagtagccaaggccgctttcgatgaaactggcttaaaaaagctgccgaaggtcaaagcactgaatgcagagtattccgatcttctgacccaaaagaaagcagcctacccggactatcgcaaggcacgagaagaaatgcaggagttggtaaaggcacagaaaaatattgaattgttcttcacagaagaaaaagacgcacaggaaaagcagcagacccgataaacgaaagtcgccgaggattctaaccctttcatggggcggaatcctcggcgacttttttagtttatgtagcagcgatcctgcgttacgagccaatcttcacacagccgttgggcttcatctgttgagcggcacacgcaattgaacagcttgccgtgcagggagcagtaggtgtaacggattttgggcacaccgttctcatcccgaaactttgtgtagcgttcctcaccgggcatcagataaagctgctccatttctgcatcgtcctttccgttttcatgtgtcaggcacacaacgcacctattctatcatgaacttaggaattatgccattgacgcttgcaccaaaaagcgccccggattttcggagagagtgtgcattgacacattcaatagcgttcggaaagaatgcgcagcctgcaccggaacggtgcagatcagaaagggtttgggatttcccaacaagcattttgcaacgcaaaatttgcatttgtgcgcacgaatgcactgcttgctggtacaatgtcatcgatgaaacaaaaatagtttcatcaaagacggttatatggttgtgccgatttccaaaacatagtaatattgaagtactaactggggctgaaagtggcaaaactgcttgcttggtttccattcaggaattactaacagcgtagaccgtccgttcgcttcgtaaaagattcaatgttttgattggttgggtcggcacaaccgttacccgtgtcaacaacgcgcctgttacttttgcgaagaagcgaaactgccctgaaaggagaggtgtatatgagttattgtccggtagctggaattgatgtcagcaaacgattcagtgatatgtgcattttgtcgccagacaacaaaatctttgcgcaagaaaagatttatcacgacgaaacatcgataaatcgagcaaacgccctactccaaaaggctgagcggctttttttcagtaagcctgttattgtgatggagtccacctcacactaccatttgatcctctttcaatttttctcagagcatggatatgacgtgatcgtggtgaatccacttcaaagcaattcgatgaaggacttctctatcagaaagaggaaaaccgatcgtgtggatgccttcaaactggcaatgatgtatcgaacaaagacattgcgtccttcccaaattcctcaaacggcaacgcgtgcgctacgccagctctgcagacatcgtgcggaattgttgaacgacgtttcgagttataaaaaccgattaacagcccttttggatcagacctttccaggctatgataaggtcttttccgatgtgggaggcgtcacttcctgcgctgtgcttgtacgttttccaacgccgaccattttgcttgtagaggaagaatcagaactggttgaagtgattgctgctgcaagcaagtctggttatagttttgctaaaaagaaagctggattgctaatctccgcagcacaaaaagcgcagacattggggattcattcatgtgccgatgaaacactcattgtgtgtaccattcaaatgcttcgtacattgtccgaaagtgtgcttcaaatagaaaccgcaatagataatttgctggctcagataaaagaaatgcgaaacaacgtttctttgctgcaaagcatccctggtattggtagtcattcggcagcccttttactaggagaaatcggagatatctcgttgttcaagaagccgaaacagcttgcagcatattttggtttagacccaacagagcggcaatccggatcattcagaggaacaaagaacaaactctcaaaacgtggctcttcctatgcaagagctgcacttcacatgggaatagttaattcgatttgtaagcgcggaaaggactctgcagcgaaccccgtactgctcagttattatgaaaagaaatgtaaaaacaaaccggcaaaggttgctcaagcagcgtcaatgcacaaactggtctttataatctttgcagtcttgcgtgaccagaagcccttcgaactgaaaacgccagagcagcatgctgttgaacagggatttgtaaaagcagcctgaagtttttgagggattcaagccctgaaacaaacacagggccttatttggtatgcgaaaaattcgaatttggcatctttcactgcccttgttctttacttggtgtaagcgatggccggactataagcgatgaataccgaactcaaaccgttcgatttcgttcttattggctacctgtgctattgactttgcttaattggtctacaatggtgttggttctgagaagttcacagccagtgagctatacagatgcccaaacctaagctacaatgaagatgtgctgagagaacgaagcattgcttgagctgaacgctcgtacgcgcaaactgttctccgccatctccattgcagcgttcgattgacgcaggttgagttatcggcagataaaaatgttgccgtacattcgtgtcacaaagcaagctgaatcggtaatgggcataggcggaaccggcattaatatcctcgaccgcgtgggcggcggcgatgccttcgccagcggcctcatctacgccatgctgcacgactacaaggccatggatatgatcaactttgccgtggccagcagcgccatcaagcacaccatccacggcgatgccaacatcaccgacgaagtaagctccatccgcaacctgatgaacatgaactacgacatcaagcgttgagtttcgccttagcgcttccgtctgccgggaaccgaccgctgcacgttggtttccggctttttttataccgtcagcgtcacaaattgacaccaatttatcattcttcacgaagtatgtgctaaaatctcttgacagcatctcacaaaatatgttatcttttgtaaacatccttgaaaagatatgacattttctggggaccgaacacaaaccgatttttctctggaggaaagacccatgaaacaggagatcatccgcaaactgagcgctgccgtggccatgagcctcgttgttggcgtctctctggccgcctgcggcggcagcagcagctccaccgctgccggtgtgactaagaccggctctgccgacggctttggcggtgctgtcaccgccaccctgaccgtggatgccaacggcactgttaccgactgcaagctggaaggtgcacaggagaccgaaagcatcggcggcgctgcactggaagagctgtccaagcaggtcgtggccgccaacggtcccgccatcgacggcgttgccggtgccacggtgaccaccaaggccgtccggaaggctgttgccgccgcactgggtgtggagctggccgaagaggcccccgccgactctgctgccgcagcccccgccgagcccgccgccatcgtcccggtggaaggcggcatccagatcggtcaggcctatgctgccgcccacggcaccaagtgcttcaccgaagcggtggctgtggtgaaggatgacgtcatcctcgccgcctacctcgacgatttccagttcaccagcgccgatgcaggcgtgaccgctgtgcccaactccgactccgactttgccgcaggctacgccgagggcaaggtgctgatgtccaagcgggccaacgctgattattacagcaagatgatggccgaaaagggcggctccacggtcgctctggacgcaaacttcgatgccatccagaactttgctgtcggcaagaccatctccgagctggaggatgtagccgccaagggtgccgaggctgtggacgccgtttccggcgcaacgctggtggataccgccggttatctctctgccatcgtggatgccgccaaaaacgcccagaccacgcaggcatcctctcatcttctccggtcacttctcatgtccttttgggcaaagagcgggcaagcgcagtatcacgcttgcccgctctgtttttgaaagccggtttttctgcagccgacgcggtggggctgtttgttgtctgttgtcttggttttggctttcctgccagttacttcatagattccagaatggcgtccgccagtgcttccagctcagtgcgcttgtccgtgcccatggacgaggcgaggctgagccgctcgttgagcaccgtcatgttcttaagctcattgttgacgaatttctgcatgaggtcaccggacttcaccgcccatgagccgttttcaatgatggcaaaggtgcggttttgcagattcaatgccttcatatccatgaggaagtcatgcatggcggggtagatgccgaggttgtaggtcacagaggccaggacaatgtgactgtacttaaacgcctcggagatcagctgggagactgaatctgcaaaaccgcacctttgccatcattgaaaacggctcatgggcggtgaagtccggtgacctcatgcagaaattcgtcaacaatgagcttaagaacatgacggtgctcaacgagcggctcagcctcgcctcgtccatgggcacggacaagcgcactgagctggaagcactggcggacgccattctggaatctatgaagtaactggcaggaaagccaaaaccaagacaacagacaacaaacagccccgatctgccgctggtgttccgtgctgcccacgtcacccttgcggaatttttcaagccagaaccgaatccactcacgggtcaagacgggctttttcagctcttcttccagaatgctggtgttcagagcttctttccgggcttccagctcgtccaaacgctgcttggtggtcggggtcaggatgccctgttcaatggcttccagaaggtttgccagccgcttctccgtgtccctgagctggtctttcaggacaggcagccgggtgttctccttctgctgggcttccatgaccaaatctatcagctgttcgatgatttcatcgctgaaaatcaccttaatggcagtgtccaccacgaaccgctccagaggctccttgcggatggctttcaggtcacagtgcgccttgccatggcgtttggcgttgccgcacttgtagtaatagtaggtgtttcccatgtggctggtgccgctttcgccacccatcagggtgccgcatgaaattgtaatatttcttaaaaaagaacttactataatctttgtttcgcagttattattcagttttcaaggtacgtctttgagtgtccttttcagggccctcaaaatcgaacaatatctactcaaactttaacttgtcacctgttccaatgactgaccatcttagatgtcggggcaaagcccctccatctgctaacgcagaccgctctgccgcttaaaagccccactggggctttcattgctgcgctacgctccgcaaacgcgaaattaaaaataatttttccgctgaacatggctagcaacgacgacgaccgccgccagcggcggaaacagggaggagttgttggggcagcggccagcaagacgcaagtgccgcccaaggcacgatgcggatgctgggtgccggtttgccctcttccgcgttcgctcgccactacttacggaatctcgtttgatgtctcttcctcgccctacttagatgtttcagttcaggcggttccctcgatatacctatttttaagttcagtataacgtacctgagtatgaacccaggtgagtttcctcattcagaaatctccggatcaatgcttatttgcagctccccgaagcttatcgcagcttatcacgtctttcatcggctcccagtgccaaggcattcgccctgcgcccttgttcgcttgacctttcaaacgttctttcaagaacatttggtatcctcttgattctctcttgccaacgaagattattgttacccttccttttgaaattgtaatatttcttaaaaaagaacttactataatctttgtttcgcagttattattcagttttcaaggtacgtcttaaattttcaatactcgaaaatttcctgtcccctttgggactgtttcttgttggggcgtgcctgccccaaaccctgcttagagcgagtacggcaaactagaagtttgggttacgagtgtccattctcatcgctttcgggcggacgaacataacgcaacatttcttcttcacaggcgccaaattccaaataattggcttttgcttcgtttagagttattccgtggtttgagtcgctggggtcatcatcagaagcaataaatggatcgttttcccaaaagcaaacggggcaaatatacccgcagtcttcttccggtggaacagtataggtaaaatgcccacaacatggacattgatgttttttcaaatatgctcacctctgcaagtactattttatcgagtttagctagtcgcgctatttggtatatggctctgtgtcttttccatcatatacaacgaccctaatgtcagcagctacaccaacatccgcatgaatacccaccgtatattctttatccgtaacattcgtaaaagaataaaaactgttcgccggaatattgtcagatacgacttcctgttcaccttcgcaaagcaaatgaactacaatgtcaaaatcatttttattttgaattgttagtgtacctgttttggataaaacttttacatcagagtatgtgattacatacttagcagaagttgattcttctgtacaggtcacagagcagtcccactgtattgctgcctttgcctttctataggattccgaagaccggtatgcagaaaatacaataattgcagctacagcaagaatcccaatgataacagacactattgttgcttttttcttcataatctttgcctccgaaaatttcgatttactgggctaagccgagtataccatactctccgatgaaagaacacccctatataggagaacttggccgttttattgcgtacgtgcgtaccaacttctcccgtacgcacgtacacagcgatttgctcgaaacgcaccctatacagccgttccccctcggagagcccactacactttgcagaccgcagggatgaaagtgtcatagtgggttattacacttccgcagaagtgcctttttctcgccgcagacaaccgggtatgccttttgtgagagctttctgtccggcgaatccacatcgcccacaggcgatgtgagcagggattccaaaggggcgcagcacccttggcacacgactttggtacaaagtctagtgtgttacacctttccagaggtgtatacgttcctgaaatgcaaaaagccccatacccaacaccttaacggtgcggacatgggacttgatgcttcctcggcctagccgggtactccgtaaccaatcctgacaggcagttgccgtgtcatttttcgaaaactgttttacggatacccagcagtcgggaacgctctgtttttctttgctgggagtatgatgaacttgttccgcctgccacgcggcaaactcccgctgcccttcctcgctgttccagcaggcaaggatggctgggtagaatgcccgtgccagacggtcgatgacttcatcggggtaaggggaagtatttgtggactttttctttttgttcaaacgcacgctcctttgatcgtcccaccgtggcaaagtcgggcgagaaaatcaaggctccgatttttatcaggcgcaagggcgcggatgctttccgccctgcacttgcggctggtggctcgttgatggcttacaagtgcctgtcgttatgccgttttagaggattcaccgctggactctgcaagaacttcgtccagcgttttcaaaaattcaaggtgaggtttcaaggcaaagcgaagaactttgacctgttccggatgcgtaagaagtttcgggttcaagtcgaacgtaacttcccaactctttcgcatgagagattcagcattgtggagccgatagtacagttcgagaaacttttggggaacatcatagttttcatcaatggtgttgctggcggctttttctgcctgcttcaccgttactttgttgggcttgactttcttcggcttcggcacataattcttgatttctttaaagatttcagcctgctcttcgggcttggccttgccgagattttcgagaagataatcgggaatgtgcagttcctcgcggaagaaccgatcacggaaaccgggagacagttcatccgcaacgtcaacgccgtgggcatagtattctgcccggcggactgaacttgcgctgctgtgattttcctgtgcaatgcgctcacaggttttcatggacttctggttgtgttcagattgaacactgccagatttctttgcagtatgctgattgccgcgaaatgcttcggtgcgcttttcagaggaatactgcttacccataaggaacttcttctgctccggggtcagattacgccgccctaactgattcttgcagatccatgcgaggacttcttctctgctttcaaacgggagcggcatggtagagaaagagatttcgggatgctcctgaacgatttcataacgattgtgaccgtcaacaagggtgttgttccaaacgatcaaaggagagagtagcttgccttccttgaggatattttcttcaagctgcttaaattcatcatcggtcagagggggaatctgagactggaactccgggtcaattttcagattgatcatacgcacactcctttatctctcctgctgcgccggttcttcctcccggaaaaaggacgcaacattctgctttgcnnnnnnnnnntttgagcagttcttccttagcttccttgtactgctcgtagaactttgccttttcggatgccagctgcgcatactcggcttccagttttttcgggctgggcagcttggtgatgttgtttgccttgaaataggctgctgccgcccggtacgctgtcagctctgcacgatgctgctcctcaaaagctgcgggtcgtttggcagtctttaactgctgtgcgacattcttggtgctggtgtaggctgcgatgtgatagcgcagctcattgttggctttcatgcgaccttcgaggtctttcaccaccgccagcgagtcgtgatacttggtttccagttcggcgatgcgctggttcagggcgtcctcgtcggtcaagcccttttcctgcagaagcttcacggtctgtgcaataactttgagattgtgtttcgtgatccaacgcttatagccgatgcccttgccctcggtcagcctcgactggatgtcgatcagtttcccgatggcatcctgcttgaactgcaccttgggtttgcgttcggtgtttgcctgcaacgtggcaagcactgccgccttatcgaacttgtccccgagatgtttcgcgcggatgaactttgttctgccagagggcagatagctgagctgtccacgactttccttgacggcaatgccgtactgctgcatgagcctgtcagaaaaatcttcaaggctcacagcgcgatacagcaccgaagaaatctgcttccgcaaagtgtcctttacggtttcaaacttcttctgctggggcggttgtccggctgcggtgagagctgcgtttgcaaggttgagcttctgctgaccgcgcctgcgcgcccaatactcagcttcgctcacacgctctttcgagccgttgagcaggtcgatctggtacagtccggcaccttcgcacagttccatgacctcgacacggaggtgccgcatggtctgggctgtgctggagtgcttcatgccctcgcgccagtcgcggggcttctgcataaagggtttgcgctccacttctcgtgttcggacgctgccgatcacgatgtggacgtggatgtttcccgaatggttgtgcccatccgggtgagtgcagacgatggcaggatgaccggggaagttttcttcgcagaatttcaggccaagtgcctgtgccatttccatggtcaagccgttgtcggctacatctcgtgggtcaaagctgatgatatactggtgggtcttcacgtccgcagactgttcgtaaaacagtattcaacaaatgacacggcaactggatgtcaggattggttactgttcactccgctaggcctaaaaagcattaagtcccatgaccacaccgccgaggtgttggccatgggactttttgtgtctgggagcggcacacctctatcgaggtgtaacacacacgactttgttccaaagtcgtgtgccaaaggagattacgctcctttgaaatttccgtcatcatagaggaaagaaacaatctattaactttcccatgcagcaacaatgcttctttctgggttttgagggtcaatagtcacctttataggtgttcccttgctcacgagagggttgaaccaaaaccaatgggactgtccataataagtgtcttttccaaccttgtattggtaccgaatcacccaaggataaattacatcttcatcagcaaggtgataggtactcatgtggaattttatgtgaaccctttttactgcattaacttttccggaaacaatctttccgtttttcagcaggtctgctttgcggatgtctgtaatccatgctaccccgataattgccatagcaataagccacgcagctatgagtgccccgattccaacttgcttataggcgatagaaatcagaaaagcaacaaaaatcccaacagcaccaagaatatggagcaaatctttagaaaagaacttatggatttttttcatggaaagacacttcctttctcggtagacaacattgtttgttctattgtatcatatgctctgtgttttttcaaaccaagtcaagtgattggtgaagcgacatgaaataattgcatctcacgacaggtcaccgaagataattggatttttgcaaaaaagaggagtagtgtatcgtcgaaggccgtgttatactcagtccatggaataattatgaactttattgttactcggcagggtttggggcaggcacgccccaacaagaagcacttcggaaacgcacgagcgttgcagaagtgtagtcccggaggaacacagaattttcaagaattgaaaatttgtggccacgggacggttcttgccctctaccgctgcgctcaaaaccgtttccggataattgtttccgaattgttaagacgcaaaaataagtagagagttccactgctcgtgtatgttgatcgccgtttgctccgaacgaagttcctgcccctgtttgtgcagcggcgttgacgggaagtcggtatcacgttcggtcggctcatgaaattttcaaggtacgtttcccataaagaaaaataccgcccaagcagcgcagcgatggattttgtcggggtgaatcggcggcaaaatgaatcgggtgtgttgcggggcggttaatctttcagggatgatccacggcgaggcagtgttcaaaatgaacacgaccacatcttgtggatggtttcaaaccaaaccacaaaatcggtgggatttgtgacagagaatatcatggtttgcagggtgcgtcaagatggttttgtaaaatttattgtgctaaagcggtaatagtaggacttatctactgaaaatcgaagcgtctagcaaagaatttatgcgcacaaattggaaaatcggcacatctgtgctatactcagagcagaatttgttgagctaaaacggaggtattgaaccatggcagagaaaaacaccgccgacattggatttgaaaaacagatttggaatgcggcctgtgtacttcggggcaacatggatgcttcggagtataagggcgttgtccttggtcttattttcttgaaatatatttcggatcgttttgaagataagtacaatcagctggttgcagacggtgatggttttgaggaagatcgtgacgagtacacatcggaaggaatcttctttgtgcctgctggtgcgcgttggagcgatgtttctgcaaaggcacatgatcccgaaatcggtcaggtaatcgatgatgcaatgcgtgctatcgaaaaagaaaacgcgcgcctaaaagatattctgccgaaaaattttgcgcgtccggaactagataaacgtcggttgggcgaagttgttgacctgtttacgaacatcaaaatgattgaacacggcagcgaaaaggacattctggggcgcacttatgaatactgcctgtcgatgtttgcagagcaggaaggcaagcgtggcggcgagttctttacaccgtcctgtgttgtgcggacactggtggaagtgctgcaaccgtttaagggacgagtgtatgacccttgctgcggcagtggtggtatgtttgttcagtctgcaaaatttgtagagaaccatagtggaaatatcaacgatatctcgatttatggacaggattccaacccgaccacatggaaactggcacagatgaaccttgccattcgtggcattgaacccgaccttggcaagtatgcagcagacacattcctcgatgatcagcatccgaccatgcgggcagactatattatggcgaatcccccttttaacctgtcgaattggggcgcagagcagctcaaagatgatgtacgctggcagtatggtatgccgcctgcaagcaacgcgaactttgcatggcttcagcacatgatttatcatcttgcaccgggcggccgcatgggtatggtgcttgcaaatggttctctttcctctcagtctggcggtgaaggtgacatccgcaaaaatattgtgaatgctgaccttgtggactgcatcattgccatgccgacacagcttttctatacgacccagattcccgtttcgctctggttcatctccaaacggaaaaagcagcccggcaagactctgttcattgacgctcggaagatgggtgttatggtaagccgcaagttgcgtgaattgacggatgggacaaaagaagaatacaaaaatgaagatggcacattaaaaaatgacatcaaaaagattgccgacacctacaacgcctatgttgcgggtacattggagaatgtaaagggtttctgtgctgctgccaccacagaagaaattgcaaagcaggactacattttgacaccggggcgttacgttggcatcgaggaacagcaggacgatggcgaaccctttgaggaaaaaatggcacgcctgacttcggaactgtcggatttgttcgtacagtcgcacaaactggaagcggaaatcaaggagaagctgggggcgattggatatgaaatctgagtggagaacagttgcattgggaagtgttgctgatcttacagttggttttgttggaacaatggcaagcaattatacagaaacaggtatcccatttttgcgttcaacaaatatagaaccgtttgatataaagctcgatgatataaaatatatatcttcgaatttcaatgagtcattaagaaagtctgagttacatcctaatgatgttgtaatcgtccgcacaggaacccccggggcatgtgctgtaataccggctggcgtgaaagcatggaactgttccgatttggtgattgttcgtccccatagaaataaactgaatccattgtttttagcatcatatgttaatttagctagtggagttatcaatacacaattagtgggagctgttcaacagcactacaatgttggggcagcaaagaaaatgcaaattccgcttcccccgattggtgaacaagataaaatagcatcaatcattggaatgttgaataagaaaattacaataaactcgaagataaacgataatttagagcagcaagccgccacattgttctcaagcctctataatcgatcaaatactgaggttagatacactgatttaatacaaatactcggcggtggaacccccaaaacaggcgaaactgcgtattggaacggtaatattgctttctttactccaaaagatgttggcacaccatatacatttatcacagaaaagactattacagaagagggactttcacattgcaatagccgactatatcctgtgaatacagttttcgttacggcaagaggtactgttggcaaagttggtctgtccggagttccgatggctatgaatcaatcctgttatgcacttgtcggtaaggaaacacatcaacttcttgtctatttttacaccctcaaagctgttgatagacttaagcataaagcaagtggagctgtatttgatgcgattaccactagagattttgattcagagcaaatcatgaagctatctgatgataatgctaaagcgtttctctatgttgctgagccaatgtttcaggagatacttaacaatagcatcgaaaacttgcagctttcaacactacgggatttcctgttgcccaagctaatgtctggtgagattgacgtctcttccgttcagctctaagccgctaaattatcgtttaccagaatttcaataactctcaccagtggcgggagattttatggagaaactgccactgccgtcgttctctgaaatcgtaataaggagatacggcgatgaaaaatcagattatcaacgagatacagcgaaaaatgctgccgtatctcaataatgaacagcttttacagctgaaaatggtgctggaaacatcgtttcaagggctaatttttgataagggcgaagagctgccaaaagctgaaaaacagaacgcagtaaaagtgtttatcaccgcaaaacgaatcgagggatgctcggaaaaaacgctgacatactattctaaaaccatcgaagcaatgctgaatggtgtcggaaaactgccgcagcaaatcacaacggatgatttgcgaaagtatctgaccgactatcagacgcagcggcgctcaagtaaggtgacgattgataatatccggcgcatcctttccagttttttctcatggctggaagatgaggacttcattgtgaaaagccctgtccgaaggattcacaaggtgaaaacagcaaaaattatcaaggaaacatacacggatgaagcactggaactgatgcgtgatcactgctcgacggtgcgggatttggcaatcattgacctgctagcatcgtcgggaatgcgtgttggtgagatggtgacacttaaccgtgaggatatcaattttaatgagcgtgaatgcgtggtctttggcaaaggcaacaaggaacggttggcttacttcgatgcaaggacaaaaattcacttgcagaattatctggatgaacggaatgatagcaatccagcactctttgtgacgctgaaagagccgcacgagcgattgatgatcggtggcgtggaaacgatgctccgtgaattgggacggcgattgaagctaaataaggtgcacccgcacaagttccggcgtacattggcaacatcagcaattgacaagggaatgccgattgaacaggtgcaacagcttttaggacatcaaaaaatcgacacaacgatgcactacgcaatggtaaaacaacagaatgtgaaattggcacataggaaatacatcggataggatggtaaaataatggctaagcttggagatttcatgcgtattaaacacggatttgccttcaaaggtgactacattacagctgaagataatgaaatagttcttgtcacgcctggcaattttgaaatcggcggaggatttaaggaaaagaaatgcaagtttttttcaggcgattatccaaaggattatgtcctgcacgcggatgatctcatcgtcacaatgacagatttaagcaagcagggagatacgcttggatacagtgcacgtgttccaaactctaacagaatatatttgcataatcaacgtattgggcttgtcgatgtattcaatccaaatgctgataaagactatctatactggtttatgagaacaccacaatatcaaaaaaagatagtggcaacggcatctggatcgactgtaaagcatacctctccgtcacgcatctgtgatgtcgaaatcaatcttccatctattgacaaacaaaaaaagattgcatcattgcttacttccattgaaaagaaaatacacattagtgaaaggataaacgataatttagcggcttagagctggatgttggaaacatcgagctcgcctgacatcaatttgggaagaagcgcatctcttagcaattctaattgtttgatttcaaatcgattttcaacgattttttccaccataggcgttgtgattgcatcaaatgagtcaagcactctagggtctggcagtgtgatttcaaacgcatcaaaatccttttttccaatatgaataacggttgtggccacctgcgtttgctcgattgcatataaaagaggtttgattgtaaaataaggaaggcttttccttttaaacgcttgtttttgaatacgcaaactcgctgattcagccaagcttcatcgctaccccaaatgtatggaacgaattctccgtccattccaactacaatatcgccagcttgcaagagatacccttttggatgcttttctgttgtgtatgttgcgaccttttgctctttgaggtctcgaatccggatgatgggaatcccttttccatctgtgttgaactgtttggaagaaaatggtgcgccataaataatatctgctatagtatagatactagttttttgccaagacgatggctttatccctccgaacggaatgcagtcaataaaccacgcagcataaagtgcttgcatttgcgcaaataaattatcgtttgtagagtttaaaaattctcgtgaggtgaaatcatgaaagatacatatgaatcatttttcatcccaacattagaggataatgaaagtgtttaccattatacatccgcagaagcgttgatgggaatttgtaagaaagagttctgggttacagaaagtcattttctcaatgatagtacagaatttcagctggggacagaaatcgttctagatgtgctcaaagatgcaataaaggatgaaggattggctgaagttcttgaaaaacttgttcctccaaaggtaaaagattcggatgtgatgcttcacattgcaaatgaatatacttatgcgggatattatgtgatttccttttgcctggataatgatagtgccttgatgtggtcacagtattcaaactatgtaggatattgcatgaaatttaatttccgagagttggtaacatcttttgatgcaaaatatatctatcatggaaaagttttatatacacgagaagagcagtatgcgtgcgtggaaaagatgatagatattgcgctagatgagagaagcgacattttaaaaattccgagtaaaaacgacgaaggaaaaatcgagaagaaacaactcattgaatttatagatagaatagtatatatatgtttgtactataatatgttttttaagaatgaatgtttctccggcgaaaacgaatatagaattatatttccagctgtacacgacaataaagaagttgcactagaggatcatacaaaacaaaattttcgagtaaaaaatgaaattttgataccctacattaaagaaacgatgaaaaatcttgattccttaaaggcagttctcatcgaacctaaaaataatagtgacattgcggaaaaaggattgaaatgctttttcagaaaccagaaaatgaacattgagatacaaaaatcaaagattcctttgagatactaaaggagaaaatcatatgttcgcatttaccgaagatacctttgaacaagcggtcatagagctatttgaaaatatgggttacacccacatttatgctcctgatatgaaccgaacagattacagccgccctctgctggacgatgttttgcgggattgtctggtgcggctgaatcgcagccttccggctgtggcaattgatgaagccatcctgaaactgaatgattttgatgcaggaagcctgttgcagaagaatagtatttttatggactatctgcaaaacggtatcacggtcaaatatgcagtcaagggtgaagaacggtcttcggtagtaaagctgattgattatgcagatgcagacaaaaatgatttctatgtggtaaaccagtataccttcgtggaaaatggaaacaaccgccgcccggatattattctgtttatcaatggcttgccgctggttttgatggaactgaaaagtccttccaaggacgaagtgggtgcagaaaacgcatacaatcagattcgaaattacatgaaggacattccttcgatgttctattataatgcaatctgcgtaatcagcgacctttcgagcaacaaggcgggaacaattacttctggacttgaccgttttatggaatggaaaacaaaagacggtgattatgaaaacactgcgtatgcgcagtttgataccttctatgaggggatgttccagaaagcacggttgctggatattctgaaatattttatcctgttttccggcgatgggcagaagccgattaaaattttggctggataccaccagtattttgcagtgcgaaaagctatcgaaaaggccaagattgccactaaaacggatggcaagggtggtgtgttctggcatacgcagggtagcggaaaatcactgtcgatggtattctatgcccgtttgctgcaagatgctttggatagccccaccatcgttgtgatgactgaccgcattgatcttgatgaccagctttacacgcagtttgccaagtgcgcacctttcctgcgtcagacacctgtacaggcaaccagcaaggaaaatctaagcaaactgctggatggtcgaaaagcaaacggcattatcttcaccacgatgttcaagtttgagcgtggcgagaagccgctgtccgaacgtagaaatattgtggtaatggcggatgaagcccaccgtggacagtatggttttgatgaaaaaattgtcatcaaagaaaatgaacagggtgaaaaagaagcacatacagtgattggaaatgcccgaatcatccatgatgccctgccgaatgcaacctacataggctttacgggaacgccgatttcggcaaaagatagaaatacgcgtgaagtttttggtgattatatcgatgtttacgatatgacacaggctgtggaggatggcgcaacgcgtccggtttactacgagagccgtgttatcaaactccacctcgaccagaatacactggccttgattgatgcgacctacgacgcactggaacagcaatcggacgctgcaacgattgaaaaaagcaaaaagatgttggggcagatggagagtgtgctgggagcagattctaccattcaatcgctgtgtgaagatattgtcacccattacgaaaagtaccgcgctaatcttttgacgggcaaggcgatgatcgtggcgtattcgcgcccgattgcgatgaagatttatcgaaaacttctggagctgcgcccgacatggaacgaaaaaatcggcgtagttatgacgggtggcaacaatgacccggaggattggaaagaaatcatcggtacaaaatctcacaaagaagaacttgctcggaaattcaaagacaacgatgacccgatgaagattgccattgttgtggatatgtggctgacaggttttgatgtgccttcactggctacgatgtatgtttacaagccaatgcacggatacaatctgatgcaggccatcgcgcgtgtcaaccgcgtgtttaaggacaaagagggcggcttgattgtagattacgttggcattgcatctgccctcaaagccgctatgaaggagtataccaagcgtgaccagtcccgatatggcgatatggacattgccaaagttgcttatccaaagtttcaggaaaagcttcaggtgtgcaaagatttattgcacggctttgatttcagcggatttattggcggttctccgttgataatggcaaagctggtcactggcggcgtaaactttgttctggacgcaaaagcacccaagcgcaaagatctgttcctgcgagaagctctgttgctgaaacagtcgcattcgctgtgttccagcatgaccacggagcaggagcgacatgaagcggcctatatggaagcagtccgttctacggtggtgaagatcacctatggtgggagtggcggcaagacactttctttgaaagaaatcaatgctcaaatcaatgaactgctgaaagcaagtatccagagtcaaggtgttatcagtttgtttgacagtaagaaggcagatgaaaatatcagcctgtttgacccggcggtgttggatgaaatttcaaaaatgaaagaaaagaacattgccgtagaaattttgaaaaaacttatggcagagcaagtttcactgtataaacggacaaatgttgtgcagtctcagaagttttcagaaaagattacacagttgatgaactcttactacaatggcttgattacaaacgaggaggtcatcaaggaacttctgaaaacggcacaggagattacagaactgtataacaacggtaaaaagctgggcttgacgcaggaagaactggctttttacgatgctctgacaaagccggaaaacataaaggacttctatcaaaataatgaattgattgacttgaccagagaacttacggaaatgctgcgcaaaaatcggacgatagactggcagaaaaaagaaactgcccgtgcgagtatgcgtaagatggtgaagcaccttctaaaaaagtataagtatccgccagaagattatgatacggcaatcagcacggtcattagccagtgtgagatgtggactgataatatgatggcataaaaaagaggatgaacaaatgaagttttgtaattttcttcttcgagttgatggcattcgtgaggcatcattggaagatatgaaagatgttgttgcaaaaggaaatcatatatttcggccgcaaaagcagaagtatttatattctgttgatatggatattatcgaagaaagatttttctggatggcatctgactacgatgatgcggtacgcttcagagattatgtcataaataaaaaaacaggtgagaagatgccgaatccacgttcaaaagaacaggttgaaccaagacaacaattttttgcgtgttatgatgcacagaaacattttctttatatgaatgactacaataagaagggatttgttgagcaatatttaagtgacacactgcaaaaggaatttaagataagcaatatttatacatcattagatgatttttgtaagaacattaaaactattcgtggatttcaatatacgcaagtggataatgtattcagccgtggaggaacattgttttctcaagttggtaacatctggggacaggacttgccaagcaagcttcaactaaaaatatcgtatggagaccttccaatacatggaggaggaaaaggtctagtagatcgtatttgtcggcatcgtgaagaatttgaagatgttgttataatcggatgtgatgaaagtggtatagagcaaacatttgatttttcgtctgttctaaaacattttttaattcagccaacaaaagatgaaaatgagcattttgaacctgatgaagtaagggaactgctgcttgcaaaactgaggtgacagtggtggataaggagcataaaatatttctgatagggtgctttataacagtttcaataatagcctacttattgaattggaattttgataatatggcagacacggcaactacgctagtatcaatagccgtaggcgtatatattgctgctgcatcagctctgcttgggagtccatatgcgaaggaactgaaacagacaacagataaaaaacggccatccaatacattgttaggaacgcttcttgactactttagacatgcaggaaaattggggatcacaactgttatagtaagctgtttatataagattccagcgacatacgacgtcccggtaataattgtacgcataggttctgcggttgcgtatggaatcttcttttgcaatattttgtttttatggctcgtttttgttttcttggttaactccatagagaaatctgtataaactttatggttgactcttgacaataagctgtctttctcgtaaaattgctttagaaaatactattattgaaaatatgaaaggctgttttatggtaaagatgatcttagatgacctccgcaagcgtctggaacgtctggacgaagatgcggatctgatgatcgataacaatgaccgctatcagatggtgatcgtaggcggcagtgcgtttattttgctgggcaagctgacccgtgctacccatgacattgatgccttgagcgttccgaaagaactgtatggcttgctcggcaagtacgacattaacaccgatgtggaagcctacatcgacaattttccgtacaacttccaagatcggctccagccgctgccctttggtggcacaaaggtgcagttctacacacccagtctggaggatttggtgattgcaaagctgtgctctttccgggacactgacaaggcagacgtagagagcgaggatgtgcggaactccttggactgggatttgctggaacgtcttgcaacggatgaagatgaactgaaagccagcatcttgaacgactggcgatatcgggatttttatatccgctatcaagagtatgtggagaggtggagaccatgcgaaagttgacatttgagggcttcttgaagcagtatgtggcagagcttgctggggtgcagacggcaagtgtccataagctggcagattgtctgaacgaaaatccccgcctgaaagaaccgttgttcctctatgcgctggccgttgataaagtagatttgttgctccgctataccgtaaccagcgctgtttctgcggaatatgagcagctttccaatctctattcgcgagcgcaaatgctgctgcttctggaaaagcaatcaccagaattgccggaaggctatttgaaggtctggcgcagttattgttcggtgcgggatgccgtccttgcagacaatgacacaaaagagctgatccatcgtcgggtattggaacttcagcagaaaaagaaactgacgaattatcgcctttacacggacttgaagctgaatccgggcaatgtgaacgcatggctcaaacacaacgattccagcaaaatgagccttgactgtgcacggcagatttacaagtatgcaaaaagctacccgtctgttcgataagaaaaaggaagtgagcctatgaccgccgtaatctatgcccgctattcatcggataaccagcgcgaagaatccatcgaaggccagattcgggaatgcacggcttatgcggaaaagaacggtatcacggtcatcaagcactacattgaccgtgcattctctgccaaaacggacaatcgcccggagttccagcagatgatcaaagacagcggcaagaagctgtttgatgttgttctcgtctggaaatttgaccgctttgcccggaatcgttttgatagcgcaaattacaagatgatcctgaaaaagaacggcgtccatctgatttccgtcatggagcccattgccgagggttcacagggcattctggtggaaactcttctggaaggtatggcagaatattattccgcagagctgtccgaaaaggtgattcgtggccagaccgaaaacgctctgaaagggaagtgcaccggcggtacgggaaccatcggctataaaatcgacgaggaaaagttttatcatcttgacccgttgaccgctccgttggtactggaagcctttcagcggtatgacaacggcgataagatggtggagatcgtaaactttctcaacgacaagggtgtccgcaatatgctgggcggcaaaatgacccacagcagcgtgaatactatgctgaagaaccgtcggtacattggcgaactgtctttccgggatatcgttgtgccggatgcaattccggttattgttccgaaagacctgtttgaccgggtgcagaagcgtctggataagaacaagcgtgcccctgcctgtggcaaggcagatgaggaatatctgctgaccaccaagctgttctgcggcaagtgtggtgcgctgatgttcggcgaaagtggaactagtgctaccgggcgcacctactattattataaatgcgccaacgtcaagcggcgcaagggctgcaataaaaagaccgtgcagaaggactggctggaagatctggtcgtccgggagaccatgaagctgattcaggacgatgcggtgatcgacaagatcgttcaactggtcatggatgtccagaatcaggagaacaccacgatcccgctgctggaaaagcaattgcgagaggtcaacaaaaagctggacaacctgatgaaggcgatcgaggacggcttgtacacccggacaacgaaagaacgtctggaagctttggaaatccaaaaggatgagctgactgcaaaaatcgcagatgaaaagttgaagaagcccagcttcaatgaggatttcatccggttctggctgatgaaatttagaaagttcgatatttcgcagaaaaagcagcggaaagcgctgatcgaaatttttgtcaatgccatttttctgtacgatgaccggatgctgatcacgttcaactacaaggatggcacccaaaccgtccgatttgaggacgctttgacggctgatggggtagaaggaaaaagttcggatttgtccagctctgctggaccataagtccaacgatttcacgttagaaatcgttggacttttttgtttataggctggcctcatttggctttgaccacaattttgaccacaatgccaaagattttatctggtcaatcgcaggggcaagtgggcttttttgacgcaacatcatctgctgcgatatgcgagccagcgttgatgccaacgatttgaaaagctggctcgcgataattagtgccgttccgtccaattttcaggccgaaaatgcctcgctgaacaactggatcgcactctgccgaatggattcctgaacatggagatcatgctcagtcatctcggtatcggcatggcctacgatgctctggatggtctggatatccacgcccaacgcctgcatcggcgatacaattccttttgtttaatgggcctgtttgacggagcatacaatcaaattgtcaggtttttggcaatactgtcgattgcgtcaaacaatttttttcccctcccccaaaaattggattttggagtgtttttcattgaccgattgcggaattagctgtaaaatctaaaaaggaatagtggctgtagagtggggtactctacgatctgctcgatctttaagtattatgataaggattacgccaatgcggtgctggaactgcaggcggccgtccggttacagggagcaggtactgaaagctatcgggggtcttgctattgcacttgccaatgatggaaagctggaagaggcacagcaggagctggatacattgcagaaaaaaggcgcttcctccggtgactgtgatctggttgcggcagagatcctgtccttgcaaaagaactatgatcaggctcttgcgctttacataaaagtgttcaatgaggtggaggacccgcagctcctgagccatgcttacctgtcagccgcaaatgcagcgctgaatcaggacgatatggaaaaggctgtgcgcattctgaaacagggatgccagaaccttccggaaggtcaggctgtgcttcaaaaggagatgcttgcggatcttatgatgcagcagacagcatctgacaaagaaaatgcagaagaatactatgctgaagcgcagcagctgctggaggaactggtggacagcggctacgatactattgccacccggttgaatctggcaactgtactgcaggcattggatcagtacagtgaagctgaaaaggttttgaaagatctgcaagagcagtatccatcggattatcgttttgatatgcagctggcctatcttctgatcgaccagctccgcaccagcggatggctcaaataaggagggaatacctgcgtctaccggacagatcttttgtgtggttggaatcgttggcatgatcgtttcgactgttgcggcagttgtttcagcatggatcctgcgcaggcaggaaaaaaagctgaaggaacagatctggaacgagtatcaataaaaatcaatcgattaaggggtatgaaaaaatgctgaaaaaacttagtgtaacggctgttattcttgcaatgtcggccatgcttctggtgccgactgcatacgcggtgcagtcagtagacgcaccggcacaggtggctttgtgacgattgacggcaagctgtatcatgtttcgaagaatggctatgccatcgatcggtacgccaagggtttgcacgagatcgacggaggaatgtactatgtcaaagaggatggctcgttcctgacgaacagcgcggtagaataccttacttttgatgcgaatggccgctatacctctggcaatgcaacgctggacagctatgtggatcaggcactggctgcgtgcacaaactctggcatgacgaaggcgcaaaagctgcgcgccgcctatttgtatgtccgggatcacggcgcataccttgcccgtccgcatcaggcaagaggcacaacggcttgggcagaagagagcgctttgttcatgtttgaacacaaaaagggcaactgctactgctttgcaggccagttcctttatatggcccggcggctgggctacaatgcctatgtagtgtctggcggtgtgggccgcaaggactcggaccatgcatgggtcatgatctgcgagaacggagttccctatatctatgatgcggaactggagtggggctatcgtgccggcagatacggccatgcagaatataatatgtataaaatgccgctgaataaaacggtgttcagctaccagtttccgtgattgctgaggtagccgaaaaatggtgctgaaacatttgtacaccctgcttgtggtgctggttggctttgtgatcttccgtgcagacaacatggggcaggccttctcaatgataggagccatgttttccggggtctctgcttctgcgcagacagggctgctgctggcgcagtgtctgaccccgctgaccctgtttgcactggcggttggccttgtgggcagtacgccggttttgccgctggtctgccgtaaagcagagcagcagaccggaagcgtgtatgcatgccttcaggcactgagttatgcaggggcgctggcgcttttgctggtggatatcctgcatctgtcggctgcatcctatgtgccttttatctatttccagttctgaggtggaaaaatgcaagtgaaaaaattaggatatatcctgtttgtgggggtcattgccacaatttgcattttgcctgtggctgtgatgccttggcagacggaaaaagcggtgggcaatgagcagcttgcatcctttcctgaattacggaaagaggatggcagcttcaataccggtatcctgaatgagttttcggattattttgcggatcatttcgggctccgtcatgagatgatcaccttgaacgatcagcttaccggaaccgtgctcaaaacgctggacagcagcagtgtgctgttgggaaaagacgattggctgttctataaaagcacccttgcggactataccggcgcagaaccctttacagcccggcagagttatgcggccgctcatgtactgggtctgatgcaggaatactgcgaagagaacggcattgggttctgctttaccatcgcacccaataaaaattccctgtatagcggtcagatgccggcacgatatacggcagcctccgtacggaacgcccaactgcttcagcagcagatggaacagcagaatgtccggtatgtggatctgttcaaaacactgtctgaccacgaagagcagctgtattaccgtcgggacagccactggaatatgcggggcgcacagctggcagcacagactttgctgaaagaactgaaaggctctgaagcggagttcgattcctgcatcaatggaaaaacatccccgcataccggcgacctgtatgagatggtgtaccctgccggaaacgagacggaacaggatacggcatacgactttacctatcagtatgacgaaaaattccactcggcagatgatatcacgatccacacggaaaattcggcggcagacggaagcatttttgtataccgcgattcctttggcatcaatctgcatccttttctggcacagagctacggcaatgcctgtttctcccggaatatgccctaccttttgacggctgttacagaagagcagcccgatgtgctgctggtggaactggtggaacgcaacctgaactggctgctggaacgcgccccggaaatgcctgctccggaacgcatggcagtcccggcagcagataccggtacaagtgcgaaggcacaacggaaggacagccgaatggaggggactttctgcctgacaggcgatttgagcgggcagcgtgtggatgacgactctccgatctacattctggcagagaccgaaacctacgaagcttccccctgcggagagggaacacagccgtttacggcgtatcttccgcagaatgtgcgggagcagcaactaaaagcagcatttctgtcggacggtgaatgggttttttgcgccctggccgactgactgaaagaatagaaagaaggaacaaacaaaatgaatgtaaactataagatgatgggtgtagtgctctgcggtgcgatgcttctggcatcgggatgcggggcaaaagcagaaacgaccgcttcctcggctgtggaatccgaatcggtttccgttgtggcattggaggctgcttcgtcggaggctgtgccggaaagcgaggctgtctcggaggcagtttccgaagcttcttctgcggtaagcgaggcggcatcggagaaaccggcagaatccaaggcggaatccaaggcagaatccaaggccgagactgcggcaaaatctaagcctgcaaagcaggagacggctgcttcctccaaagaagaaaagacggagcctgtggaaagcaagcccgttacagagactgctccggcagaaactgccagcctggaaactgccctgaagtatgtgggcaaagacgtttccaagctgtatgccgctattggcaagccgaacagttcggagtatgctttcagctgcatcggtgatggcgaggatggcctgctgcattacaacggctttactgtgacgacctaccgtgaaaacggtaaagagacggtacaggacgcctattaaacatgaaattcggcctctggcattccacagggggctgaatctttatatgggaagatgagaatgaaacgccagaagatcaaacgatatcggtttagcgtgacgcagaatacgcgcagaagaagggcggcaacgccgctgaaagccgtcggtgtagtactggtgtgcctgtgtctgctcacaggggccgtttttggaatttacaaagcgatccagagtaagactacggggtggcacggcgaaggactgcatcgctactatatctcgccgactaccggcacccgtgcgcaggggctgtatgagatcaactataagctctactattttggcagcaacaactttttgaaggtcggctggattgaagagaacggctatgtcggctatgccaacgcagatggagagctcacccagggcgaagcgaagatagacggaaaatactactatttccaaccggagaccggccagttgtacaccggctggatcatgctggacggagtgcagtactgctttgacgaaaccggacatccgcgcaccggtacttatcaggaggacggaaaggtctgggaactggatagcgatggacgggtcaaaaaccgactgaacggttggaaaaaaacggacggcgtcctgaaatactacaacaacagcggcgcaccggcacagggctggacagagatcgatggaaaggattatttctttgtggacggtgtcagtcaggccggctgggttgaaacggatgcgggcacgcgctatttggacggcaacggaaatcagatgaccggatggtgtgtgatcgacggccagccctatgcttttgggacaaatggtgaactgaagcagggatgggatcattcccatgaaaaaagctactattttatcaacggcgtcagtcagtcgggcacattcggggagggcgcacttagcagcaacctgaacggcagcggcagtgttcagccggttgggaatcaggcaccggaggacgatcttgcagaggatgccgagggcgaaccgccggaggaagaactgctggaagcgcagccgacacagaccgaaacaacggaagcggggcagactgccccggcggcacaacagccgacgcagtcgccggagggatcggcggcagagcaggagaccgcattgaaggcaccgacagcgccggaaactccggcacaggaacagcaggaagaagggacggaaaatacatgaaaacaacaagacgtgattttctgtgcctttcggccatggcatgcgcatggcttctgacgggctgccagaaccccacagtggaagagcgggctgtcagctggcagcagcaggaagtcagtgatccggtctctgaaaccggaccgatgtggaatgcagcactggacgacaatgcagttctgcgggatggcatccgcgttccccagaacttcgaactgccgttggaaggttcaacaggctttgcaggggcggctgtgatgctgctgtacgagagaccggatgggaccagtacggtactgcgcagacttgcagcgggagatatgttttatatccggcaggagtctggcgcatattggcaggtctgcctgctggacggcaccgtgggctggttggaaaatgaactgtgtatgatcaatctgcccgatgttctgccttccatcgtatacgaaaaccccaatgccaaggcatcaatctttaaaacctgcggaaaggatattgaaggcattacgggacagaaactgtatgacggcctgttctacaaccagcgccttgggcgggatgagtatctaatgcctatcaattacgctatggcaaaaaaggttggtgcagcgcagaaagatgctttgaaggcgggcgattgcctgaagatcgtagagacattccggccctatgaggtgcagatgctggtaaaggatgcagtgtacgccaaggcaaggacggacaaggaactgatgacggcgctgaacaagggcgcgtggaatatcggctggtttattgcaacgtctctttccaaccatcagcgcggtgtggcaatggacacgaccctgctgcgcatcactgagcagacagagcacagcatggcggggtgtccctttgtacaggtgaccggtgaggaatacgccatgccctctgccatgcacgagctgagcagtgcggcggcctgctttaccggcccggtaacttctaattcggccaccgcatggaagcgggccactgcatcggcatccatgacagacggtgcgcggcggctgcaggggtactgtaccaatgcaggcatgacaccgctggcctcggagtggtggcactttaacgatctggatgcacagaataaggtgcgcatgacctctggaaacggaaaattctggctggacggctgtgtcagctggaaaatgtttgaagcataactttagggctgcactaaattgcgcagcaggtcattcggatcgaggatgggcaaactctgttaggaggactgtattatgaataccacattgcggcgggatgcggatgagatcatctgttccagcattcaggcagtgctgccggataaagcggtgtgccgcgcgctggaggactttcagcccggaggcggcagagtgctgctggtggcggcaggcaaggccgcatggcagatggcgcatgccgccgtgcaggcactagggcgcgtggacggcggcgtggtggtgaccaagtacggccatgtgaagggcgaaattcccggcataagctgttatgaggcgggtcatcccgtgccggatgacaacagctttgcagccaccgaaaaagctttggcgctggtgcaggggctgaccgcagaggacacggtgctgtttttgctttccggcggcggcagcgccctgtttgaaaagccgcttgtctccggcggggaattgcaggacattaccaatcagctccttgccagcggagccgatatcgtggagatgaacaccatccgcaagcggttgtccgctgtcaagggcgggcggttcgctcagcactgcgcgcccgcaagggtgttcagcatcgtgctcagcgatattctgggcgatccgctggatatgatcgccagcggcccggcggtgccggattcctccacctgtgcacaagcgcttgccattgcggagaaataccacctggacctgtcagaacaggcaaaggcgctgctggcgcaggaaacgccgaaagcccttgacaacgtgaccacacagatcaccggcagcgtccgagagctgtgcaccgctgccgctaaagcctgccgggagctgggctatgagcccatcctcctcaccgaccggctctgctgcgaggcgcgggaggcaggcagctttctgggtgccatcgcccgcacccatgcgggacaaggaaaaaagctggcctttatcgcgggcggggaaaccgtggtgcacctgaccggcaaagggctgggcggacgcaatcaggaactggcgctggccgcagccccggcgctggcgggacagaacgccgcagtgttctccgtgggcagtgacggcaccgacggccccaccgatgccgccggcggctatgtggatggcgacaccgccgcagcactggcagcagcgggctggaacgtgttcgacaccctgcaaaacaacgatgcctaccacgccttgcaggcggtggatgggcttatcatcacaggcgctaccggtaccaacgtcaatgatgttgccgtggtgctgatcgggggagaagtgcaggcagacgcctgaaccctgcttgcccggtgcgcggtgctcctataacatttgaccccgctttgcccgctttacccgggcaggcgggtttttttgttgaaaatacttgacagttcttctgcaaaatgatatgattttgatatcagaaagaaacacttccgaccctgataaggagggacttgttatggaagagaaaattttgaatacccgcaaaaacggcatggccgcgctgctgctcaccctgctgggctatgtggtggccatcgccctgttcatttacagcatcaccctgctgaatgcagaccggatgcttctgggcgtgccgctgctgattttgtccattgcgtattggatcgcaggcattttcctgttctgcggtcttaaggtgttaaagccgcaggaggcgctggtgctcaccctgtttggtgattacatcggtaccctgaagggacagggcttttactgggtaaaccccttctgtaccgccgtcaaccccgccgccggcacccgcctgagccagagcggagacgtgaacagcaaggaaaacagcgtggctgcgctgtttggcaataacggccagaatgctcagatgagcgtcgagtccatgagcaaaaaaatctcgctcaagatgatgaccctgaacaactcccgccagaagatcaacgattgtctgggcaacccggtggagattggcattgcggtcatctggcgcgtgaccgataccgccaaggctgtgttcaacgtggataactacaaggaatacctctccctgcagtgcgacagcgccctgcgcaacgtggtgcgggtgtacccctatgatgtttctcccaacgtggacaccaccggcgacggcgtagccgatgagggcagcctgcgcggctcttctgaggtggtggctgcccgcatccgagacgagatccagaagaacgtggcagaggcaggtatcgaggtggtggaggcccgcatcacctatctggcctatgcaccggaaattgcagcggtcatgctgcagcgccagcaggccagtgccatcattgacgcccgcaagatgatcgtggacggcgctgtgggcatggtggaaatggcgctggatcgtctgaacgagaacaaggtagtggaactggacgatgagcgcaaggcggcaatggtatccaatctgctggtggtgctgtgcggcaaccgggatgcccagcccatcgtgaacagcggcagcctgtactgatatggcagagccgaaaaaacaggtgcccctgcgcctgaacgccaagctctacgatgctcttgccgcttgggcagaggatgacttccgctcggtgaacgggcagatcgaatatctgcttaccgagtgtgtgcgtcagcgcaaaaagaacgggaaatatgtctccgaccagctggatgtcccgccggagctggatctccattgaagaacccgtgaaaaaacgtttggagcgcgccgcagagcacgccaaacgcaaattattcacaaggccgctgcacaagaccggtgcagtggccttgtgtttgtcggggaaaagccgtgccttccggcgggaagcagggacaaatgagcgctgatttgatatatcaattgagcgcgcaatgctccggtatttcgtcgaaaaaggcgaccgaagctgcggaaatgacttgaagagacaggagaagatggacagatatctgggcgaaaacgtttcttttttgggcttttccggaaaaaaacttgcctaaaagtttgcagcgtgctaaactaacagcggggaattgttttgcgtaagcagatagggggatgaagctatgaaaatactggttgtggatgacggtcagcttgcgatcaattcgctgatccgcatcctgtgccgggtggcaccggactgtgactatatcagtgccatgacgactgacgatgccctgacgtggatgcggcagggcccgatggatgctgcctttttgaacctggaaatgccgggcatgaatggccttgcccttgcccgcatgattcagaaattgcagccccgctgcaatatcatcgtggtcaccgagcacccggagtatgcactggaagcattgcagatcttcgtcagcggttttctgctcaagcccgccaacgaggccgatgtgcgcaatgtgctggaaaatctgcgctacccgccggaaacggcacctgtgggcatcaagatccagtgcttcggcaactttgagatctttgtgggcggacgtccgctctccttcaagcgcagcaaaagcaaggagctgctggcctaccttgtggaccgcaacggcgccacctgtaccaacggcgagatgctggctgtcctgtgggaggataagcccgacaccgcctcgctgcacagccacctgcgcaatttgatctttgacctcagccatacgctggaggatgcaggggtcaacgggctgctggtacgcggccgcagcaccttggcgctggataccagcaaggtggactgcgattattataacttcctgcggggagaccgctcagccttcaactcctaccggggcgagtatatgacccagtattcctgggcagaggttacccgctcggcgctgcgccagcaggccgcagctatgcccaaaagcgggtctatcccaagctattacgtcccgcccacgggcttttaaaactgcataaaacgccaaaggctgctgcgcaaacgatgcgcagcagcctttatcattctcttaaaatcgttccagctccagcagatattccttgatctccagtccctcggcgtagccggtcaggctgccgtctgcgccgatgacccggtggcatggcaccacgatgcacagcgggttgcggtggcaggcgctgcctacggcgcggcttgccttgggtttgcccagcgccgccgccagttgcccgtaggtgcgcacctccccatagggaatcttgcgcagctgcgcccataccgcctgctgaaaggccgtgccctttgccgccagcggcaggtcgaactcccggcgcaccccggcaaaatattcgttcagctgctcctcggcttcctgtaacaggggcgtttccaccaccctgcggggcagaggttccagctccggcgcaccgtccgggcaaaaatgtaccccgcacagcgcgtcgttttcctcctccagacagatggcaccaaggatgctgttgatgtaccagacgttcaaaaccggcctcttcctttcctgcaagaatgtgctatactggtattatcttaacacaaaagcttccatgaggaaaggggcgtttcaactatggtcaaggcactggaagacatcattgcaaaaagcagcagcatcgtcttttttggcggcgcgggcgtttctacggagagcggcatcccggatttccgcagcgtggacggcctgtaccaccagaaatacgactacccgcccgaaaccatcctcagccataccttctgggaggaaaacccggaggagttttaccgtttttaccgcgacaagctgatcgtaaagggtgcaaagcccaacgccgcccatctgcggctggcaaagctggaacagcagggcaagctgcgggcggtggtcacccagaacattgacggcctgcatcaggcggcgggcagcaaaacggtgtacgagctgcacggcagcaccctgcgcaactactgcacccgctgcggaaagttctacgatgtggatttcatcgcaaacagcaccggcgtgccccgctgcaccgagtgtggcggcatcgtaaagccggacgtggtgctttacgaagagggcttggacgaggaggtgttgtccggcgcagtggatgccatccgtcatgccgataccctcatcatcggcggcaccagtctggtggtgtaccccgccgccgggctcatccggtatttccggggcgataatttggtggtcatcaatatgcagcccaccggagcggatgcttctgccgacctgtgcatcgcaaagcccatcgggcaggtgctgagcgaggacgtctcgctggactgatttttgcactgtaaggcgcgctgtttcgcgccggttcgcgcgcagttttccgtatgctgatggaaagaacatcagaacggaggaactgcaaatgatccaggtatgtgacccgccgcgtcagcggcaggtacggcggctttccgccgaggaattttttacattggtgcgctgcggtggggcggggttttaccgcccctgctccgaggtgctgcggatgctgaccgcaggcgaggcgtggggcacagccggggcagcgctgctggtgctaccccttaccgccgataccgccgccgcagcggcactgcgcaactggctgggacgtcggcagctggagggcggctgcctgctcaccccgccggtaaataccggcgaggagctgcccgcccggctggtggaaattgccgcagcccgggcagaccggctgcgccgcaagggcacggcatgggcggtggtagagtgcaccgaaacggcggcagcgctgttgccgctgtattttcggcagggcttcggactgcgggcgctgcgcccgctggaaagccttgcgccctgctttttgctgcgcaccggctgcgtgcccgcccgcaccgcgccggtgtgggtgccgctggaggacagggtacagctggcgctgctgctggcaaagggctatgctgcactggacagccgcccctacggcggcagtcttgcactggcgctctatccgctgaaagaaacggaataacgtaaaccagagagggaatgggaaattatgaaggcagtgattctggaaagctatgtgatggaagaaggggacttggactggtccggggtaaaggcactggtgccggacaccaccagctatgtgcgcaccgactacgccgacatcgcgccccgcatcggggatgcagaactggtgctcatcaacaagtgccgcattgacgaggcaatattggcgcagtgcccgaacctcaagtgggtgggcatcatcgccaccggtacggataatatcgaccttgaagcctgccgccgccatggggtggcagtggccaacgtgccagggtactctacttatagcgtggcccagatgacttttagcctgctgctggccatctgccagtgcgcccagcggtacgaccgggcagtaaaggccggatactggcagctgggcatcccggcagagtacggtctgctgccgcaggtggagctgctgggcaagacctttggcatctacggctacggcagcatcggccgccagaccgcccgcattgcaagggcctttggcatggaggttctggtgtgcacccgcacggtgcgcccggagtacgccgccgatggggtggagttcgtggactttgacaccctgcttgcccgcagcgatgtgctcagcctgcactgcccggccaccccggaaacccgcgggctggtcagccgggaagcccttgcaaaaatgaagcccggcgctattttgctgaacactgcccggggcgcactggtggacgaggaggccgtagccgatgcgctggaaagcggcaagcttgccttttacggtgcagatgcttttgccaccgagccgctgccgccccaaagccggttgcgcagtctgccgggcgcggtgctcaccccgcatatcgcatggaccaccaaggaagcattgcagcggctgatggatatcaccaccggcaacctgcgcagctttctggccgggaaaggcgagaatatcgtcaacccttgattttggcagggcactgtactatactgttccatgatttcaggctctcccggcaaaggaactgccgtaaaaataacgtatgcacaagagcatccggcagctttgccgctgctctgagggaggtaaaaatgagttacgccatcgtattcagcagcaaaaccggcaacaccgcactgctggcacagaccctgcaggagcagctgccgcaggcagactgctgctatttcggcgcaccggacgctgccgcgctggcagcagacaccctgtatgtgggtttctggacagacaagggcaaggcggacgccgacacgctggatttcttgcagcagctgcacggcaagcgggtattcctgttcggcaccgcaggctttggcggcagtgcgccctacttcgaaaagatccttgccgccacccggaaggcgctggatggcagcaacactgtcatcggcagctttatgtgtcagggcaaaatgccggtgtccgtccggcagcggtacgaggccatgaaggcaaagcctttgcacatccccaatctggatgccctgatcgaaaacttcgataaggcgctctcccacccggatgccgcagacctggaacagctgaagcaggccgtaaagtgagtgaaaaagagcgaccgcacattgttttgtgcggtcgctctttctgtataagctatataggacaaacgctagtcaatggtggttttggtgcgcccgatgccaatgacggcggtggaaatctttttccagctgtcgcagccgcacacgccgtccacccgcaggctggtgcgcttctggtagccgcgcagcgcctgttcggtgcgggcaccaaagatgccgtcgatgcgggtgccggtctgatagccaagggtggaaagtgcatcctgcaaaatcatgacatagcagccccggctaccccggcgcagggtggggtaaccggcggtggtgccgctgcaggccggtgtgccgtagcgacggtcaaagtgcacccatgtgggggtctggctcagcggctccacatagccccatgcgccggaagcacgggcggcgttataaatggcggtgcgctggcgctggtcaaggctttgccccacatcgaacgctacccccgcgtagtgctggctgcgggtgccgtggccaccctcccagatgcggcggaaggcgtacccaaccgggatgcccctgccgtatttgcggcgggtcaggttccatgcctccatggcggcaatggtggtccatagggtagggctggccgatttgccccggaactcccgcagccgcagggtggtcagggtgctgtaaggcatggggtcgttctcgttcaggtttgcgtaggtgtacaccttgttttcgtaggcgtcatagatcaaaaggcgtgccatccctcattcctccttctcgcagccgcaggggtcagtacactgggcttgcaaggcgtgccatgtttcgcggtacacgatgccgtttaccggctgcagccccgcctgctgctggacagcccgcacggcagcggcgtctgacgcgccaaagcggttgttatcggccacatatccctcgccgcaggaaagctgcgcccggcggttgagccagcgctccacctgtccaacctcctgcccggcgctgccttcggcgatggcgcgtcccgggtaagcgatgccgggaggggtgtctctatcggggttcggggcatgggcggccagctgcaagctcagtgcctccaccgccgtccatgtgtcggcatctgcaatgccggtctgctccagccctaatagctgctgggcgctgcgggtggctgtggcagtttcgtcggtataacggtcggcaaggggcgggacttccacactggaaaaataataggcgatgcgctgcaaaagcagattgtaatacaatacggtctcaccgctgctgcccaccgtcagcggcgtgccggggtagggcagacgctttaaggtgaccaccgggccggaagagcgcagctggctggcgcggccatagagggagttccatgtggtgcgccccaccacgccgtccacggtaagccccgcaaaccgctggtacgcccgcactgcctgctcggtatccgcgccgaacttgccgtcaatgcttaccggcgggatactgctctcgtaggcgctcatgaggtagagatagaattgcagctcccgcaccggcgtgccggtggagccgctgcgcagcacgcccgggtactcgccggggcgcagggaagaggagagcagccggttggcaatatcgttgtacacctcgtacagcttttgccatgtggtgcgccccaccacgccgtctgccgtcagcccgaagtaccgctgaaaacgccgaacagctgctgccgtgcccgcgccgaattttccgtccacagtcacgctttcaaggctcgtgtacacggtgcgggcaatcttcagccagaactgcaccagccgcacattctgcccggaggcaccctcccgcagcggcgtgccggggtaggcgttgggggtgccattgtcggactggatgctcaaaaactcatcgtacagttctttccaagtggtctgccccactatgccgtccaccgtgaggccgtacttgcgctggaaggcgcgtaccgcattggcggtggcggtgccgaatacgccgtccacttttacggatggaatggcgctgtcgtactgcgccagcgtgttcagccagaactgtacctgctccaccgcgctgccggaagcaccggtgctcagcaccgtgccgttccatgtgccgttggacagggtgccggtggaagtctcgccctcgctggtcagctcggcgaggtcctttaccgatacatagatgtagctgatcttgtaccatgtctgccgccccaccacgccgtcggcggtcaggttgaactgcttctggaacgcccgcaccgttgcggccatccggctgccgaatacgccgtctaccgtcagtttgccaaggaagggatagtccttggtaatgcggttcagctgcctttgcagggtgaataccgccgcgccgcggctgccctgccgcagcggcgtgccggggtagctttgcgggatagagcggatatttttggtgcgcacgatctcgatgctgctgccgtagtagtagcgcaagatctgcaaggcgctgcgtccgttgttggccagcgtaaccgtgccccactgcttgagccccgggcaggtgaccgacttgccatcgcagtactcggaataataggggttcaccgtgccacgcttgcgcagataggtgttaaagatatcgtccgtaatgcgcaccatcacctcaaacaccgtgcgtccgtggacgtagtactggtcgtagctggtggagttggtgatgttgaaggtgtagcccttgctggggtaccactcggtatagatgcggttcagcgccaacgagatctggcagtggatattcgcccgcagtgcctgctccggccatgtgggatacacctcgctggaggctacgttggcaatataatcccggaaggagactgtcacgttgcgggcggaagctgccggtttgcccagatgcaccgtgatatttttggggatgatgacctgttccagcacccggggtgtgcagttttcccgcggctgcgggccgctgccgccgctgccggcaaacagggcgtgcggcgggatgacgatgggtgcgtccgggatgtcccggtcttcctcggtaacaggaagcatctggggctgcgccagcgttacctgcccggcaaagatctggatgccctcaatgcgcacggtgcggtagccgggctttgcggcggtcaggctgacaatggcgtaggggcgagtagtgttgtcctcgtccagcgagagggtgcaggcaggggcttcaacgggaatatcggcggcgctgccggtggcatcagtgatgcagtgcagggtaaagccgtccccctgcaccgcaacggtcaccccctccacgggggcagactggcgtgccgcaaaggtctggatgcggagagttccggtgtttttcatggagatacgctcctttgctggtaaaagtatgcttctgccacagcgtattccgtccggtgcccgggcgtgcatggcaatgcccgcagcaaacaaaaaagccgcccgaaggcggcaggggagaaagcttatttggcgctgtccttggcaagggcggcgtcaatatttttttgcagggcggcaaggttttcttccttgtcaatgccgcccagcaggggctggcctacaacattgccgtcccggtcaaagacgtaggtggtggggaaggccatgatgttcagtgcgaacttaccggcctcgctgccggaagcaaagtagatgttgcggtagcttgcgccctttgcagccagcagctttttggcggcatcaatgccctgctggttgccgtccagtgtctcggtgttgatgccaatcacctcgccgccctgtgccttgaccttctcgttcagggcgttcaggtcgtccagttcctccacgcagggcttgcagccgttgaaccagaagttcaccaccgtaaaggcgttgcccgcaaacaggctgttgtccaccgggttgccctctaaatcgctgccctcaaactgggggaaggcggtgccctgtgcggcagcaccggaagcggcatcctccgcgggggcaagggcggcaatctgctcctcgatggcacgaatcttttctgcatcggcggtcagggtcttgtactcctcatccgagaactgatcttttgccttttccacggcgctcaacagaaaatcgccgtagttcgtgctgagggtggtctcggtcacgtttttgtccatggaggagaacaccttctcccacagggcatcgtttgcggaaaggatctcgttttcctcggccagcagttgctcctcggtcttgctttccgcagccgcagtggaagcggcagaagaggcagtagatgcagaggatgcgccctgcccgcaggcggcaaggctgaaggccagcacaaggccaagaaaaagtgcggttacacggttaagcttcatggttttactcctttgttgtttcagtgtttgatttgtctcccagtccgaatttatactggatggcatctgtggggcaggctttcatgcacatcccgcagcggatacattcggcgtggttgggggtcttggtaatgtctacgtccatcttgcaagcctttgcacaggcgccgcaggagacgcatttgtgggtgtctacacgcatctggaacagcgaaactttgttcagcagtgcatagaacgcgcccagcgggcacagccacttgcagaaggggcggtagaacaccacgctgcccacaatgaccgccagcagaatgcaggccttccatgtaaacagcttgcccagcgcggcgcggatgcccgcattggtcagggagaggggaatggcaccctccagcacgccctgcgggcagagatatttgcagaagaacgggtcgcccatgcccagctcgttgaccgccagcaatggcagcagcaccaccatgaccagaagcacagcatactttaaatagcgcagcggcttcagtttcttggtggaaagcttgggagagggaatcttgtgcaaaagctcctgaaaccagccgaacgggcacagaaagccgcagatgaaccgtcccagcagcaccccgaagagaatcaggatgccggtgatgtagtaggaaaagcggaatttggaagagcctatcaccgcctgaaatgcccccaccgggcaggcaccggcagcgcccgggcaggaatagcagttcagccccggtacgcagacgtattttccgctgccctgatacagtgtccctttggcaaagttgggcaggtggaggttggttaaaagggtcgccccggcctgtataaagccccggaagcgagcaaggggatttaattttttcttatccaatgcctacacactccatacacagccggatggcctttgaaaatacggtgtctgcctcgccccgccacacgccgaacagcagcatcagcaccccggcggcaagcaaaagcagctgcgcctgtttttttgtcatgaacatcatagcctcctgttgtttgatggcaccagtatacaccatgggagataaaatttctgctaagaaaatcttaacacgaatcttaacaccgtctgctataatctgttataatgaaaaaaacgcaatttttatgggaagggtggaaaataagatgcgtcttttggtggtagaggacgagcactccctgcgggaggacattgcccggaagctgcggctgtccgggtacgaggtggatgcctgtgcagatggcgaagccgcgctggaagcactggcggcagagcggtacgaccttgtactgctggacctcaacctgcccaaggtggacgggatgcaggtgctgcgcagtctgcgcaggcacgaccttgagacctgtgtgctgatcttatcagcgcgcagtgaaatttcagataaggtagaggggctggatgccggggcaaacgattatctttccaagcccttccatcttgcagagctggaggcccgggtgcgcagcctgacccggcgcaagttcatccagcaggatgtctgcctgtgctgcgggcggctgagcttcaacacccgcagccgcgttgctactgtggatagccagacccttgcgctgacgcggaaggagagcggcgtactggaatatttgctgctgcatcagggacgcccggtcagtcaggaagagctgattgagcacgtctgggacggcagcgtggacagcttcagcaactccatccgggtacatatctctgccctgcgcaaaaagctgcgggcggcgctgggctacgaccccatccgcaaccgcatcggggaaggttacgagatcggaggcgaggcgcaatgaagcatttatccctgcaatggcgcatcaccctgctgacggcgctgctcatcgcctgcgcctgcgtgtgtatgaacctgcttttataccgcaccggcgttaccggcatggatgccctcaacggctttatgatgcagtaccagcccggcagtgcggattcgttgaccatcgagatcccgcaggaggaaatgtccagcctgctggcgcatttttcacaggaagtctacgatgcaaaggtggtttttggccgcaagggctggtgcatcaccgctgtggtcaccatcctcagcgcagccatcgcttattttgtcagcggcagagcgctgaaacctttgcagcagcttgcgcagcaggcgcagcgggtcgatcaggacagcatcgccaccgtccgtctggacgaaaacaccgtgcaggaattcaggcagttgagccggtcggtgaaccggatgctggatggtctggcacagtcttttgaattgcagcggcagtttgcgggtaacgccgcccacgagctgcgcaccccgctggccattttgcagacaaagctggaactgtttgcagaggagcacccggccatggatgccgagaccgccgggctggtcagctctgtgcgggagcagctggaccgcctgaccgcccttgtgcgcactttgctggaaatgagcaatctgcaatcggtctcccgcaccgaccagatcgctcttgcaccgctggtggaggagatcttgaccgacctgacctcccttgcccagaaaaacaacatctccttgcagcaggactgcgcggagctgggcatggtgggtagtgatgcgctgatctaccggctggtgttcaatctggtggaaaacagcatcaagtataaccgtcccggcggggcagtgcgcgtcaccctgcggcaggaaaagcaggccgctgtgctgcgcgttgcagataccggccccggcatccccgcagactgccgggagagcatcttccagccctttttccgggtggataagtcccgcagccgggagatgggcggcgtggggcttgggcttgcccttgtgcgggagatcgccgtactgcacggcggcagcgtgaccgtggagagcagcagcgaaaacggcactacatttgccgtcaccctgccgctggcacagccctgctgaaaccgggcggactggggctttatttttggcacacgggggagtatactggaaacagcaggccccggaaaataagaaggacaaaggagatactgaaaatgcaggcaaccattcacaatgaatttctgaccctgaccgtggacacccacggtgcagaggccgtcagcctgaagaatgccgcaggcgaagagatgctctggcaggccgaccccgccatctggaagcgccatgcacccatcctgttcccgtggactggcaagctggtggacggcacctttgccgccaagggcaaaacatggaagggcggtcagcacggctttgcccgggatctggagcacactctgctgcgggcggagggagacaccatccagctggaactgcgggcggacgatgccatcaaggcagagcgttttccctatgattttgtgcttaccagcaccttccgtctggagggcaagaccgtgcaccatactttgcaggtgacgaaccccggcaccgaggagctgcgcttcggcatcggcttccacccggcgttcaatgtgccgttcgatgccaagcacaccaccaccgactacgagttccgttttgaccggccggaaagcccggtcatcctcgatgccagccccaacggcttgctgagcggcaagagctattaccagtggaagaaccagcaggcgatccagctgaccgatgacctgtttgccaacgacagcttctgcatggcaggcctgcgcactggcaccatcggcatctgcgaaaaggacaccggccgcaatatcacctgccgggtggagggctacccctattcgctcatctggtcggctcctgcaaagccggtgcgctttgtgtgcattgagccgtggcatagcctgcccgccgctgccaccgacccgcaggactgggagcagcgcgccgcagccgcctgccttgcccccggcgaaagctggcagaccacccttagcaccacctttgaccggtaagaaaaaagcacgcagaaacgaaactgcgtgctcttgacagaaacctcaaaagcgggtatactgtaaatagaaaaggcactgcgacaagcggtcagcccttttgatgtaagttcttaaagactaagaaccgtcaccggccagggtggcggttctcgctttttaccttgatggtaaataccaatccgaagatatggaacgtcaaagtaattggcataagcttcacctcctttcggaagtggggccgaaccgcctgccgttatgtgcagtgccttgctgctagagcagcaactctataatagcatataattcgacaaatgacaagtaaaacccccggagcacaaaagcgctccgggggttttgtatcgggtcagaaaggcaaatgcttagtaagcaacgccccagtagaccatggccttggcgggcttgccgcagcaggggcacacatcgctgagctgctcctgctcaaagggcatgcagcggctggaaagtccggcctcttccttcatcttcatctcacaggccagatcgccgcaccacatggtcttgatgtagccggtgttggccttggccagctccttcacctcgtccatggtggtggcagcccaggtgcgcttttcgcggttttccagtgcacgctggtacaggtccttgcgcagagcttccagctgggcggggatggcggtctccagctcgtccaagctcacaaagaccttctcgcgggtgtcgcggcgcaccagcacgcactggttcttttccagatccttggggccaatctcaaggcgcaggggcacgcccttcatctcccactgggcaaacttccagccgggggcgttgtcgctgtcgtccagcttcacgcgggcgtacttgctgatcttctcggccagctcggcagccttctcggagacgccgggcttgtgggcggcaatgggcaccaccaccacctgaatgggggcaatggccgggggcaggatcaggccgtcgtcatcgccgtgggtcatgatgatagcacccaccagacgggtggaaacgccccagctggtctggaacggatgatgcagctggttgtcacggccggtaaaggtgacatcgtaagccttgctgaacttgtcgccaaagtagtggctggtgccgctctgcaaagccttgccgtccttcatcatggcttcgatggtgtaggtggcctcggcaccggcaaacttttccttgtcggtcttgcggcccttcaccacggggatcgccagatcctgctcgcaggtgtctgcatagcagttcagctgctgctgggtctcagcctcggcctcggcagcggtctcatggatggtgtgaccctcctgccaccagaactcgcggctgcgcaggaagggacgggtggtcttttcccagcgcactacgctgcaccactggttgtacttcatgggaagctcacggtagctgtgcagcacgcgggaccagtggtcgcagaacatggtctcgctggtgggacgcaccgccagacgctcctccagcttgtcggagccgcccatcgtgacccacgccacctccggcgcgaagccattgacgagctcgccttccttctgcagcaggctctccgggatcagcaccggcatagccacattctcatggccggtagccttgaaccgggcgtccagatccttctggatcagttcccagatggcctgaccataggggcgcaggatgataaagcccttcacactggagtactccaccagctctgcctttacgcagatgtcggtgtaccactgtgcaaagttttcttcctgactggtgatcgcctgcacgagcttcttgttgtcttttgccattttgttatatcctcccaaggccgtgcgccaaacgctttacgttccgcacgaaccataataaagccccgtctgcctgcacggccgtgtgccgcactgcaaaggcggggcttttgcctaaaagaatcagttctgcgcgtggctgtccacaaagtttaccacatcgcctacggtgcgcagggactcgatggcgtcatccggcacctcgatgccaaactcgtcctccagcgtcatcaccatgtctacgatatccagactgtcagcctcaaaatcgctcatgatatcgctttccagcgtgatctttgccgggtcaacgtccagctgctcagccagcaatgcacggattttttcaaaagtatccattcctgtggtctcctttttgcagttgtattgcatacgcgtacagcccgccgtgccccggaaaaagcctccggtatccggcacagccttgcctgctgtacaaagcgctctctttttttatatcccatgcagtgcgtattgtcaagccctgttttgcagcaactgaagaaaattgtctgaaagctgctttttcccttgacatctcgtgccggtttttttatcattataaagtaatgagtttaaagggactgaccagtcccttttataaggagcgataagcatgaagctttcattcaccaaaatgcagggctgcgccaacgattatatttatctggactgccgcacctccggtgtgccggaggagatcgcggcgctttcagagcgcttgtcccggcggcacttttccatcggcgcggacggcatcatctgcatctgcgcaccggtcacagccggggcagacgccatgatgcgcatcttcaatgcggacggcagcgagggcaaaatgtgcggcaacggcatccgctgcgtggccgagtggttgtacactcacggcgttgcaaagccgaagcttgccatcgacaccctgagcggcttaaagaccgtttcccgcatgggcgaagggctgtggcaggtagagatgggcacctacaccgccatggcggcggcgctgcccgccgtgaacatgggcgaaggaccgctggtagatctgcccctggaggtggaagagaacctgtggcgggtgacctgcatcagcgtgggcaacccccactgcgtgaccattgtgccggaggtggacagcctgaagctggagcagatcggcccgggctttgagcaccacgaaaacttcccggagcgcatcaacaccgagtttgtgcaggtggtggatgccacccacctgaagatgcgcgtgtgggagcgtggcagcggcgagacatgggcctgcggtaccggcacctgtgccaccgtggcagccctgaccgagctgggcatctgccccgccggagaagacgtccatgtgcagctgcgcggcggcgagctgaccatccgggtgctgcccggcaagcagctgctgatgaccggtgcagccgagaccgtgtgcgagggcacgaccgaagtgtaaataagaaccctctcagtcgcctgacggtgccagctctcccttcgggggagctggcgccgagcgaatgcgagatgactgagagggttgcaccaataaaagaagcgagggaaagtatcatgaagatgaacaagcattacaacgaactgaaggccagctacctgttcgtggacattgcccataaggtggctgcgtatcaggaagcacacccggaaaaggagatcattcgtctgggcatcggcgatgtgacccagccgctggcaaagtgcgtggtgcaggccatgcgcgacgctgccgaggagatgggcaccaaagagggcttccacggctacggcccggagcagggctaccccttcctcaagcaggccattcagggctactacgccagccgcggcacccagcttgccgaggacgagatctttatttcggacggcgcaaagagcgaccttgcaaacctgctgggtctgttcgatgtggacaacaccgtgctggtaccggaccctgtgtaccccacctatgtggatgataacgtcaccgatggccgcaaaatcatttacagccgcaccgggcaggaaaatggtttcctcggcatgccggacgagagcgtgaaggcagacatcatctatatttgcagccccaataaccccaccggcgctgcctacacccgcgcacagctgaaggcatgggtggactacgcccgcaagaatgatgccattatcctgtacgatgccgcctacgagtgcttcatctcggagggtgagcttgcccgcagcatcttcgagatcgagggtgcacgccagtgtgccgtggagatctgctccttctccaagatcgcaggctttaccggcacccgctgcggctacaccgtagtgcccaaggaactggagcgcgaggtcatgaacatcaacaagctgtggctgcgccgtcagaccaccaagttcaacggcgtgccttatgtggtacagcgcgccgctgccgccgtgttcaccgagagcggcatggccgagatccagtccaatctggactactaccgccgcaacgcaaaggtcatcgccgatgcactggacgagtgtggcgtgtggtactgcggcggcaagaacagcccctacatctggctgcgctgccccggcaacatgaagagctgggagttctttgactggctgctggaaaactgcggcgttgtgggcacccctggcgtgggcttcggcgagtgcggcgaaggctacttccgtctgaccgccttcggcgatgcggaaaagaccaagcttgccgccgagcgcatcaagaccgctatcaaggcactgtaaaacctataaaaatagcacccgctgtccattttggatggcgggtgtattttttttgcgcaccctcttgacaaacctgtatctactgtatatactgtacatatacagatggaacgcgagtatcaaaggagcagccgatggaactgtttatcaacaacaaaagcggcgcgcccatctatgaccagatctacaaccagatcaagcagcagatcatcagcggggctttgcagccggacgaggccatgccctccatccgggggctggcacgggatctgcgcatcagcgtcattaccaccaagcgcgcctacgatgaactggaaaaagagggctttctttacgcagtaccggcaaagggcttttttgtagcccctaaaaacaccgagctgctgcgggaagaaaacctgaaaaagattgaagaacatcttaccgaggccgtccgcctgtccgcatcctgcgggctgagcagggaagagttgcgggagatgctggaactgctgtgggaggactgaacatgaacgcactggaactacgggggcttacaaagcactataaggactttacccttgggccgctggacttgaccctgcccggcggcaccatctgcggcctgatcggtgaaaacggagcgggcaagagcaccaccatccggctgatcttggacatggtgcagcgggacggcggcaccgtgaccatccttggcagagacagccgtaccgcttctgtccgcaccaaagaggaaatcggcgtggtgctgggcagcgagggcatccccctgtgcctgaacgcggtgcagacgggcaaggtgatggcgggcatctaccgcaactgggacgctgcagcctatgcggagctgtgccaaaagttcggcctgccggacaaaaagcagtacaaggactactctaccggcatgaagatgaagctgtgcatcgccgtggcactggcgcaccacccgaaactgctgctgttggacgaagccaccaacgggctggacccggtggtgcgggacgaggtgaccgacctgctgctggactttgcccgggatgaaaaccactccattctcatctcctcccacatcgtcagcgacttggaaaagctgtgcgataccatcgcctttctgcacaagggcaggctgctgctctgtgaggaaaaggacgccctgcgggaggaatatgccctgtggcatggcacggcagcgcagctggcggcattggatacgccggtgtacggcaagcgggtcaccccctacggagccgaggcgcttgtgcgccgggatgcaatgcccgccggagcagagcttgccccggtaagcattgaggaattgtttgtactgatggtgaaaggggagaacgtgcaatgaaaggtctgctattaaaggatgcctatcagatgtggagctacaccagatggatcattctgatgtcggtggctatgatgctgatgggaacgtttttcatgaaggaaggttctaatttctttatgctgtacagcgggcttttgctgggaatgtcgcccatgacattgttggcgtacgaccagaacggccggttcagcgcttacagcgccgccctgccggtgacaaaaggacagatcgtgggcggcaaatacctcatcggactgtgtggtatggtgctggcggaactgctgagcatgacagcgctggcggcagcacagctgctctggggcacggtgacggttcagctcaccgtggcgaccctgcttcaggtggctatgctgaccctgctgggcaacattattttgctgccgctggcctaccgcttgggctaccagaaagcccggtatgcgtactacctgtgcatcggtctgcttgcaagctttatgggatatttcgtttcttcgggggacaatgctttaaacagcctcctgcctgcgcagggctcgctgctggtgctggtcgtagtgctggcggcggcgctggcgctgtatgctctctcatggcggctgtccgttgcatggtacggaaaggcagagcagtaaaatgaagaaaagtcaaatcgcaggcatcctgttcggcgttgccatgggcgttttgttcagcgtgtcgatggggacagtcggttttgcgctgggcgccggttttgtcggtctgggcatggtgatgtttgaagggctggatgacccgccagataaaaaataatacaaaaaaacaggtgaaccgcatctttatcaaaagcgttggcttttgaaaaggcggtgcacctgctttttgttttttattctgcgctgtaagcgctgcccatgatccacgggttacttgcggaatattttgcgtggttgcgcaggtaggtgacccatgcaccgtagccgttgccggccgaaaggtgtacgccgtccggtgcggcgatcatctctttcaggttgccctcgccgtcagccagtgcctcccacaggtccagataaacgcagcccttgctggcggccagctgtgccagctgctcgttcacgccgcgcagcacgtccgaggcaagccccggcttcttttccgctgccgcaggccgtaccggcgggatggactgcacataaataatgcagtcctctcccagcgtctggcgcagctcgtccagcatctggccgtagtaggccagaaaacggtcagatgcgcccaaggtggtcagggtgttggtgcccagcaggatatacagctttttgggctgcgccgctgccagcacatccagtgccacctcctgcccgcgggtggggctcttgacggcggcgcgattgacgatggcgtccggccccacacccgtatagccgcagatgagcgcgccgctcagattgatctgatagtccgaaaagcccaccgtcaggctgtcgcccagaaaggcagcgtccgaaaaatagctcaggtctacctgaccgcaggccggctgccggataacactggcgtcataggccttaatggtataagcgccatcggtctgccgggcggggccgaagctttccagctgcaccgcctgtgccgtgccgctgctatcggctgcaccctcgctgccgctgccggaagcagcctcgccctgcatgggcagcggtgccagaatgttctgtgcaatgccgcctgcgccggtctgcggggtgctgtcctcttcaacggttcctttttccaagatggcggtcaccgcataggcgaccagcaaaatggccacaatgacccccgccagccgcagtttgccgctgatgcccccgcgtgtgcgccgccggggtgccgaatgatactcgtgtgaaatgcccatattctctgtccagctttctgcatttatcccaacaggcaggtacttctgcccggtaattttggagtgcgcacccattttatcatattttttttgcctgtgcaaccaattgggtcttgcatacaacaggcaaaacgggtacaatagaattgcagcttattttgcacattttacaaaaagcaaatacacaagctgcaaatatttttgtgtcagttgcggcagatggctgttttgccgtcccggtccgttggcagtgcagggccgacagaccactttactggacggtgcggaaagccgtttgcccggcagcggacacattttattatgatctgaaggaggtttccatggccaagaatatcatcattggtcagagcggcggccctaccgccgtgatcaactccagccttgcaggcgtatacaaagctgcccgcagtctgggtgcagacaaggtgtacggcatgaagtacggcatcgagggtctgctcaaggaagagctgctggagctcaacgttctgctggatgaccgcatgagcatcgagctgctcaagcgtactccgtccagctatctgggcagctgccgcttcaagctgcccgacccggataccgatgccactccgttcgtcaagctgttcaccctgtttgacaagtacgacatctgtgccgtgttctacatcggcggcaacgactcgatggataccatcgcaaaactgtcccgctacgggcagcaggtgggcagcaatgtgcggttcatcggtgtgcccaagactatcgacaacgatctgtgcctcaccgaccacacccccggctacggctctgccgcaaagtacattgctaccatcttaaaggaagtcatccgcgactcctcggtgtataacatccgcagcgtgacggtggccgagatcatgggccgccacgcaggctggctggccggtgcggcctgtctggcaggcggcgaggactgcgaaggccccgacctgatcctgctgccggaagtgccctttgatcaggacaagttccttgcccgggtggacgagctgcagcgggtaaagtccaacgttatcatcgcagccagcgagggcgtaaagaccgcagacggtacttacctgtgcgatctggtgtccaccgccggccagctggacgcttttggccacaaggccatcctcagcggcaccagccgttacctttcggagctcatccacgacaagctgcagtgcaagagccgtgccatcgagttctccaccctgcagcgctgcgccagccatttggccagccgcacggatgtgaacgaggcctacgccgttggcggtgccgccgccgctgctgcctttgcaggcgagagcggccgcatgatcgccctcaagcgggtctccaactacccgtaccagtgcatcaccgagtctgtggatgtgcagcaggtggcaaatctggaaaagaaggttccgctggaatggatcactccggacgggatgcaggtgaccgaagcttttgaggagtacgcccgtccgctgattttggatgaggtgacccccgtgtatgtgaacggtaccccccgccacatccgtctgtgatctgcctttcccttccgcgtctgttttcgtgcgactgcacgtttttatagccgaaacagaaaaaacaaaaaaggagaaatcatcatgggaaaaaatgcaatcgtcggtcagtccggcggccccacctctgtcatcaatgccagtctggcgggtgtctttgaaagctgcaagaaccgcggcgcagacatcgtgtacggtatgtgcaacggtgttgccggtctgctggaggagcgggtggtggatctttccaccctgctgaccgatgacttggacatcgagctgctcaagcgcaccccgtccagctttctgggcagctgccgctataagcttcccgactggcgggatgacgaggcggtgtacaaaaagctgttcgccattctggaaaagctgaacatcggttacttcttctatatcggcggcaacgactccatggacaccatcggcaagttggctgactatggccagcgcgttggcagtgacattcgctttatgggtgtgcccaagaccatcgacaacgacctgatggtcaccgaccacacccccggctacggctctgccgccaagtacattggcgttgtgatgaaagagatcatccgcgatgccaccgtgtacggcaccaagtacgttaccgtggtggagatcatgggccgcaatgccggctggctgaccgctgccgccgcactggccaagagcgatgattgcgagggcgtggacatgatctgcctgcccgaggttcccttcaacgtggagcgctttgtggaaaaggtgcgtgtgatgcaggaaaagaagcccagcatcgtcattgccgtttccgagggcgtaaagctggaggatggccgctatgtctgtgagctggcggacgacgtgcacgccgtggatgctttcggtcacaaggcgctgaccggtaccgcacggtatctggccaatgtggtggcccgcaatctggacaccaagacccgctgcatcgagctttccaccctgcagcgctgcgccggtcacctgaccagccgcaccgacatcaccgaggcctatcaggtgggtggtgctgccgccaaggcagcctttgagggtgttaccggccagatggttgccctgaagcgcatctccaacaatccttaccagtgcaccaccgagctgcatcccatcagcgaggtcgccaacctggaaaagaaggttcccctgagctggatgaacaacaaccatacccagatgaccgaggacttcttagactacgcccgtccgctgattcaggccgagctgaccccgctgtacatcgccggtctgccgcaccacatctacatgaagaaccagaagtgattttctcctgacctgtttttgtcaggctgaaaagccctcccgcccggacgctgtaaagcgcacccgagcgggagggcttttgtgatctctgcctttatttcttctttttttgcgcccagcccaaattatgggttgacaaattgcgctttcagtggtaacatatacaggcagtccaaacgactgcaaaaatgaatatgggcgtgttcccgagtggccaatggggacagactgtaaatctgctgctttcagcttcggtggttcgaatccacccgcgcccaccaaacaagaaaaatccgaacctatttccgattggagaagggttcggatttttcgttttcttcgggtttgagaatgaaggctcccgtggacggcgtaaaactccgataccttgtcatagaccgtaagccaataacaagatttggaggatgcgattatgaagtacgatgcaagagcctgccatttcaacatggacactggatgtgtggagctgcggctccgggatgggagaaaaatctccatcgactgtaccggggtcgaggatgcgctggatgtgaccatggcccagcagactgaactggactacctcatctacaacgacccactgggctatgcggatttgattctgaacggtgacccggaggagtatttgaaaaacgtagctggaagccatgggttagaagattaagggcaaaaaaataagaggtgcgcccaactggacacacctcggcgagatacatctatgtaaggcagggcgttccctttaccgggagcgtcctgctgtttttatgcggcaacaggcaatgcttgtagagcttcctgctctttcagccattcctcatattcacgctggccttcctcgctgttgaaaaactcaaccatggagggataaaagcaacgtgcaagggtcttgattgcttcatccgggtagccggatttgtttgacttcttctttttgttcaaatggtatcctccgaaaatcaaagttctatatcctgcccacgcgtgcggttttgctgcggcacattcatggtgtgctcctgcttgggggcaagaatcttttccagaaagccacgcaccagttcaggagcacggtggagagcatccagatagggctttacatcgtaccacaggtcgtggtacttgttgctccaatgaatggcttccttcttggcggtggaaagttcttctttcaggcggcggttctccacgtccatcatatagccgtggtcagcctgttttttcagtttggaaaattcttcttcggtcagcgagtagttgccgagaaaggtgcgcttgccgatataatccagatcacgcgcatgaatgagggcttcttttgtgagcgtggcctttttctgcacagcggcaagttccttttcggtcttggagagggttttgttggtttgggtgaggtgctgctctttctggnnnnnnnnnngctgtccagccgttcctgctcccgttgaactttgaactgggtgacggtcaggtgttcttcggtgctgccacgttcgccgcgctctatatcggtgtacccggcagcgcgcataaaattgaagaagttgtcctgcaagatgctgtacgacttcttcaggactggcttgccgttcttttgcaggacgggctctccagcatcgtccatcaggggcttggatgcccacttcttgcttcggctgacctgcatgacggtctccttgacggtgccgaccagtgccttgtccttgcagcgtttcgaccagaggatctgcttttccaccacaggcacatagaccacatggagatggtagtggtagacctcccggcctaatgcttcggtcatggcgcggttgatctcatctgcgtgcatgactgctgagaggatatattgctcaccgcccacgatctgaacggctgctttgtaggcatcctcatagaactgcttggcaaactcatagccgccgtgattgtcaaagtaggcagagttgacatcaaagacaagttcacagtagtgggtagcatccggcttcaagccgcgcgtggagatggttccggcggcttccagttgggcgaataggtcggtgtagctggcggttggctttttgaagtggacgttccatgcagcgcgctgggggataatatcggggttccgatagctgtccttttcacgctcattgtgctgctgggtgttgccaacggccttgtctgaaacggcgagatttcggacactggtgcggtcaacgccatcgtttcttgccaaagggcatccctcctttcggggttcagaggaaggtgacggggacggagatgcacttccccggaagtgtaataacccactatgacactttcatccctatgggctgcaaagtgtagtgggctcttcgaggactctccgagggagaacgtctcctgcgggagagctccgatcaagttcgcacaatgcgaacttgattgctccgtacgcatctgaaaaaattgcgtacggacttcaaataacccgtacggtctgtacggtgtacggagacgcgaaatataaacgatgacgcgttttaatttacttctacttgccgtacgggtgcgtacaagtacagaccgtacaggttgtacgaacttcttccgtaaaaaatgcactttttacgggcaggggtggacaagcggctcgatgcccacgaatcctcgcaccctgcgaccaccgggcagatagatgttgttggtggcttcaaggttatagcggcggtcgttctgtcgcagttctgcgctgaaacggatcgccgatacgctgtggcaggcgttgtcctcgcaccactgtttataaatgtcgtagaactccttggagctgatggagtagtccgccttgaaacggaagtagccctcggactccatgaagtcgatgacattgttgctgctgcgcttgatggtgtccacgttggcggcggctcgttcgctgaccgtgaagcggaagttgttctgcaccagccggtgcagcccttccagacaccacagcaggatgccctccaactcggcgcacatcttctccacaaggaaagggtcatccgtgcggtcggcgggcttgtccttggtggtcaggatgagctggcggcgaaagaagccgtccgaatggtcatacagcgaggtcagcgcaccgttgccgaagcagagaaaccgggcgtaaatgtcccgctggtagctctggacgcccttgcgctccaagtccagcttggcttcggcggtcacgatggtcttaatataattcgttttaggcagggcattcatgtccatgtcatcgtcgatcatcagcaggcggcgttccaaatcggcacgggcaaagcggttgttctccactttctggacgctgccattgctggcggcatctcccatgagccgtttcagcaccagtccgatgcgggacttgccctcgccgcccttgccaacgatgagcatcatcttctgtcccttggtgctggggatcaggcagtagcccagatattcctgtaaggtagggatgtcggcttcgtccagcagctcgtgcaggaaggtcagccaacggtcaggggtggcggctttggggtcatacttcacaggcaggcgattctggcagaacaggcggctctcctgaaaagagccatccggcagatggtacacgccgttctggagatggatgcagtcctgctcgatggggaacgggtcggaaaaggccagcagcttgatggtctccagaatgttggtgacctttttggacaggccggaggtgacatattcctcaatgttttccaagatgcgctgcttgatctcgctctcgtcctccaccgggccgtccagcgtgtacagcgtaccgttgacgcatttcagcggccactgttccagaaaggcgcggccaaactggacttcatcgatcttcttaccgttgtaccagtccggccataaagggttgcgggaaatgtttttcttcatgtggtggttctcctttaaaaaagtaaagtggtgattatcataatgataagcaccactttaggtgaatgaatcgtcaggcgcactttgccagagcaaggcggtcggtgcgctcctccaacatcagcaggtacgacccggacagcagctgtgcggcggcatcggccttctgctggggcgttccaaatgcaacgcagtccgtcaggtgttcgatggtctcggtcatgtggagggcttccacgaaccgctcgtccagcggttcttccgggctggcgggcttgtagcgctcctgccagtcgtgcagcaggtcgagatagtcggtcagcacccgcaggcagtaggcgatgtctgcccactgctcgtccgtcaggccacgcttgggcggcggcagagcgatggcattggcgggcggcttgtccgggtcaagcccgaagtcagttatcagcttctcggcggcttgccgggggtttaggtcgaacagcttggcggtgaggtcgatggcatctccattggccccgcaagcgaaacagtaatagtaggattcgttcagcatcatactggggtcgctgtcggagtggaacggacagcacaccatgccatggcggtcgggctccatgccgtacatctctcccacctgccgaacggtgatggcggacttgacagtttgatacaggctcaagggcattcctcctttgtttcgtgcgttgcaccagagtccctagcgtgggaactctggtgttttttgcttcctgcctgaatatacggaaaattttgcaggaaaggcgaaaaagcggcagaactgcaacggaaaaagaaaaatgccctcactggttgcagggctgcaacagcaagggcagagaggaaaccgtatattgaacaaaacggcagagcgtattataatgaggaaaaagctcaaaaaggagggccgaccacatggcacaggaatatctgcccgcaccatccaacatccgtcttgcggacttgatgaaagagcacaacatcagccaaccagaacttgccaaggaactcggctgctccaagagcaccatcaaccgttttatcagtggcgcaaaaggaactctgacccatgagcaggtgctgaagatcgcaaggctgttcaacgtgtccacggattttttgcttggagaaaccaatatccccgaccgcaaaaattacgacattgccgaactgggcttgtccgtagaagccgcaaagaacctctacacagggcgcatcaatgcagaggtggtcaacctgctgctggaaaacgcccgctttgcagagcttacttaccgcatagcgcagtattttgatgatacctttgcatccggcatcgcagcacagaacgctatgctcacgacattgagtacccttctgcgcacaaaggtcaagaccccggaagcagccaaggctgcaaaggacatcagccttcggagaaagcctgtgtaccaaggcgaccttgatgacattgagatgtatttcatggcagcggtcaaggagatcaaaaagggtatcgggagccattacgccgaacaggaagctatgagtaagaaagtggcagagaagatgttcaccgaattgaccaaggggcaggatgtacagcacccaacgattacagcagagcagctgacggatgcaatgttggacagtgtttcgggcatggagggagctacgccggaagcactggaacagctgcggaacggtctgctgggaatcttgcagtctgccgcagagcaggaaaacgcccatgaagcagacgaatgaacggctttgtgcgctggcgcagaaaggcgatgccgccgcactggacagcctgattgaaaacaacaagtcctttatcggcaaggtggcaaatgaccttttccgcagtatgaatctggcgcagtccggtctgaatcttgacacggacgatttgaaacaggcggggaatctgggcttatggaaagccgtgccgaaatttgatgcggcgcgcggcatgaagttcctgacctatgcggctcctgccattcgcaacgccatgatggacatggtacgggatgcctttgccacttttgaacagcggatggtgacggaggataaggacggcgtctgctaccagcgcgtttcgctggacgatgttctgccgggagaggaacaactgcggcgcattgaagccatagccgacccctacgccatgcagccgcagagtattatggaagagcaggaatcgcgccgggaactgtacgatggcctgaaacggctgacccaacgnnnnnnnnnnnnnnnnnnnnnnnnnnnnnnnnnnnnnnnnnnnnnnnnnnnnnnnnnnnnnnnnnnnnnnnnnnnnnnnnnnnnnnnnnnnnnnnnnnnnnnnnnnnnnnnnnnnnnnnnnnnnnnnnnnnnnnnnnnnnnnnnnnnnnnnnnnnnnnnnnnnnnnnnnnnnncaaaaagacggaggaacaagctatggataacctgtggctggaactgccgtggtggtttgattgaatgggcagagaggaattgtgtcaaattgacataattcctcccgataagagggatgtgagcgaaaatgctggcaatgtatctggcagttctggatgaccagagcagtgaagaacagtttaaagatgtatataatacttacaagcggctggtctaccataccgcttacaaaattatgggcgattcgtatctggcagaagatgtactgcaagaggtgtttttgtacgttgccaaaaatttttctaaaattcatcgagaaaactgtcacaaacttgccgcttatctcgttagttgtagtagaagccgtgcatacgatatgcttcgcaagcagcgagaagaaccgctggaggaagtcccggacgcaccagatgacgccccggtgccggatgatgcagcagtcagcaccgacaacatcgaacacctgacagaactgatcggacagatgaaaccgatgtaccgtgacccactgcgccttttggcaatgggctacaccaaccaggagattgccaaatcgcttggactgacggacgaagtggttcggatgcggcttttccgtggaagaaaactattgtggaaggagttgaacagccatgagtgagagggcagaagtttcttttgatgctgcattgatgatggcactccgtgcagatgcacaaaaagagctggatgagctgccaagtccggcccagcttaaggaacgctacccggacacgtcccgatgggatgctcgcctgcaagcggcgttgcataaacgccgccctgtgctgaaacgagtgcttattacggtcctgacgctggtaattttaactctcggcgcgcttgcagtaagtgcagatttccgcagggcagtctatacgatgattcaaaaatttctgcccattgagatgcagctgacgtatcaggtggatggtgagccgttggaacagcttccgaatggatatagcgaccattatgtaccggacggctttgaaatggacgatgcgcagaaatttgaacgagtagaaaactttttacatgtttactcgtcaaaagaaacagaggaaagctacactgtccgttgttcaattatccagccggggcagcagtccctatttgataatgagcatacagtgtacgaaaccgtaaaggtcggagaagcagatggcgtacttggaactagtacggataaacatggaaagaatgtttatactctaagttgggaatatcaggggattacacataccgttattggaaacattccatacgatgagattatgaaaattgcggaaggtatccgttaagaaagccggacacttgtgagcgttcacaaatgtccggctttctttttgtctgaacttacaaagatggagaatttgaaaaaatttctcctagaaattgaaacgaagcgaatgcgaattgcgttgattgtacaaaggctcttgataggagcaaaaaaacggaggtgtatgtctatgcgtggaactaaaaaatataagattgttaaatgtttcagacatttcggtgctattataatattgctatggctaatttctatcgtaagatttccgtattcttttgataaattgcaagtgttatcaaataaaaattttgaaagcgtttcaaattctgtgttaactcttgttgattgtaaatcgaccgaatcgaaggcttcaattgattttttactaactgatggaaagcaatattacattataacggcaaaacgtttctttatagggaatcgatatgatttatctcagctgatgcctttctcagaaggaacaagttattgctatacagactgtttcaccaaggtgaatgttattcaatcaggcaataaattgtgtttagatgaggaaagatatgttcaaccttatatcttatcgtttctctttttgtgcgttgtgttaatgctcaatattttgggagataaatccactccagagaaatagagataatgacgtgcatttataaagcccttgaaatatggtggaaaaagtgtgaatagcaatttgatttctcttccaaaagcaactcacactcaatttactacatggtgggcgcaatattaaaaaggggtagcctggaatgaatggtttagataaagttatagagcgtctgaatcatgcgcatgcctatgttgatgtcaatgataagaacatcttttattatgtggactgttccgtaattcaagactatggacaagtcgaaactttcgacaatgagcatacggtttatgagcgcattaaaattggaacagccgatgcaacacttggaacgagtaataacggaggacgtacaggatatgtgctagtatgggagaaagatggcatatcacatacgatcattggaaagataccacgtgaagagattctaaaaattgcagagagcatttcctaactggctgaatttttgcccacacgcttgtaattatttacaaatgtgcggacacttttttgttgaagcgtccaaagctgacaagattttgaacttttttcaaaaaagctgtcacaaacacagtgtgaactacgttgactaagcaaaagctcctattagaaacaaaaaattggaggtgtattgtctatttatgatgagaaaaaaagcaaaaacaatcacaatgactgtgatcttgattttggcgattatactgatttgtataaaagtcactcactttgtgataatagaacgtccattgaaacaatgcaggatagtatcagcataccatgctcagactgtatttggaggcgtggagggccggcgtcaagaccatttactatgtccgcagcaaggcccttgaggtcgagtcctgcgaaagctgctcgtcataaggaggatagcatgacggaactgaagaaaaagcccctctttaacccggagggcgaccctgatgtgcgcctgcggcgcatgatcggcggcaataccacaaacctcaacgacttcaacaatatgaagtacgcttgggtcagcgactggtaccggcaggccatgaacaacttttggatcccggctccatgtgtgtgaccacaagatagtcggggctgcgcccctccaacacccgcgccacattggaaagccattcttccgctgcccgtgcgtccacgctgtccatcacggcaattttctcatccagaatgacataggagttgtagctcactcccataggctggacggagtactggttttcaaagagtgccaatgtgacttctacgacgatatgctctggcagtccttctacgccgcttcgctctcccccagctatctcaaccgtcagccctatggcttccttgtgcaggatcacagcatctatttggtgcagcaggaggatgcctacaccgataatttggatgccgcattggatctcggtattgtcatgctccacttctccgccgtcgcctcccagtgggtggggcaggtacgctgggaactttcacctgctgcgcccgacggcctgccggaaggacttcgctccgctgcggtgtaccacatgtaacgactctgggggaagcaaggcaacggtaaaatgcgcgaccgtcgatctgcggttgagcgtatgttccattagaaaagaagaacctatcagtcagagtctgagtaaggaaaataggaggtattttttatatggctatccaaacggtaacagatgccatccgctatgtaggggtggatgataacacattggcactctttgaaaaccagtactccgtccagcctatgggagtgagctacaactcctatgtcattctggatgagaacgaacacagaagttaagcttacttgtgccgaagatagttagctggaaacggcttgtgaaaataggtagtcgccgacttaacaaagagctctgagatgaaagtctcagggcttttttgttgcgctatatatgccaaggggttgcagaacagggaaaaagttggtatcctcaaagcaggaaggggtgagaatatgcgttcggacagaacccgcaaggatacagcaaagcgttatatagcggtactggcgcttttactgttctgcagcatcgtatttaatgtgcagacacattatcagcgcaccacggcaatccggccggaggacgattatcggggcaggatatcgcagtttcatagtagcgtagatcgggatgatgacggcgtagacgatcagttggatattctgaacggtgcactggcctatgtgagcacacatccaaaatacaaaagccgttattatgagaccggttatcctgacgatggttatggcgtttgcaccgatgtagttgcatatgcgttgaagaatgcgggatatgatctacaagagcttgtggacgtagatatccgggagcagccacaggattatatggtggaagaaccggatgcaaacattgatttccgacgggtacgaaacctgaaggtgttttttgcacacacagcagctgccctgaccacagatgtctcagaaatagaggaatggcagggcggcgatattgtgatctttgaaagacatatcggcatcgtgtccgaccggcgaaataaaaacggagtgccttatatcattcaccacaatgccccatggcagacagcttacgaacaggacattctggaaaaacgaaccgacatcgtggggcattatcgaatttcaaaataaaaagcgtccccgctgcactgtgcataacagtgcggcggggacgcatattttattgggtggtgtaccggttacgatacaagcctcagcttagcccttgcctgcgcagccgaacagctcgatcttctccttgcacttggcctcgatggcctttgcgccgggagccagcagcttgcgggggtcaaagcccttgccctgctgatccttgccctcttcgatgtacttgcgggtggcctcagcaaacaccagctggcactcggtgttgatgttgatcttggaaacgcccaggctgatggcctttgcgatcatctcgtcggggatgccggtgccgccgtgcagaaccagaggaatgttgttggtggccttgtggatgcggtccagagcctcgaagtccagacccttccagtttgccgggtagacgccgtggatgttgccgatgccagcagccaggaagtcgatgcccagagcggtgatctttgcgcactcttcgggatcagcaatctcgccagcgcctacaacgccgtcctcaacgccgccgatggagccgacctcggcctcgatgctcataccatgagcgtgtgccagagcgaccagctccttggtcttttccacgttctcctcgatggagtagtggctgccatcgaacatgatggaggagaagccggcctcaacgcaggccttgcagccctcgtaggtgccgtggtccagatgcagagcaacgggaacagtgatgcccatggaatcgaccatggcgctgaccatagcggcaacggtcttgaaaccggtcatgtacttaccagcaccctcggaaacgcccagaatgacggggctcttcatttcctcgcaggcggtcaggactgccttggtccactccagattattgatgttgaactgcggcacaccgtagtggccatcgcgtgccttgagcagcatttcggttgcatttaccaacattattcattacctccaaaaattatcggggttccggctctgccacacaccgcattgtgcatggtttaacgagcccacatggttagtataccccaaactgcgcctaaaatcaatccgaacaggcgctttttcttgcgcagagctgctgcggaacgggcacggcacaaagcggctgatgcagctgcggcagaaatactctgcgcttggcgacaaaaatccatatacaatgcaacatccgccttgtgcggaagcggcacgggttttcaacatattttaacattcgtcaaaatgatgttggaggaaattgcaaaagcggacaatttctggttcaaaaaattgtcataattccaacttgaattttacaaattgtaaggcttttgccaggatatgggggaacctgctgttgaaaacccggtggaaattgtttaattccacccggaaaacaggcgctgcggctggacttttacacactttccactgagttttcaacttgtggaaaaatcacaggctgtttacggaatgtatagacacattttgtggaaaactttttgctttggcaaaacagcggaaatgcgccgtgctgcccgggcagcgggcaaaacatttttacagctgccctgtccggcggggaagctgcgttttactgaaaaaattttaggcgtcagaaaataaaatccctgcaatttgtggcgaagccgggcgagatatggtatactttatcttggattatcataaacaaaataaaacgttcctgtgcggcgcagcccgcccggaacggaaggagcataaaaagatggaagaacgtaaccagccgcgccgtccgcgccgcgatgcagagcagccgcagcagaaaagtgagagcctgatctacggcaaaaacccggtgaccgagctgctcaagagcggctccggtgtggacaccgtgcttattgccgaggggatggccccggcagtggcggcatactatacggcactggccaaggaggccggagcaacggtcaagcgggtgcaccctaacaagctgcgcctgatgaccggcaccgagagccatcagggcgtggcggcctttgccagcgagatcgagtacgcgaccgtggaggatctgctggccgcagccaaggccaagggtgagccgccctttctggtgctgagcgatggcattgaggacccccacaatctgggcgcagtcatgcgcagcgcactgctgtgcggtgcccatggtatcgtcatccccaagcggggtggtgcatccgttacccccaccgtcatcaagtccagcgcaggcgctgccgagcgtctgccggtggcacgcgtggccaatatcggcgaaaccatccgccgcctgaaggagcagggcgtgtttgtctactgcgccgacatggacggcgtgtctctgcgcaagaataacctgaccggccccatcgcgctggtactgggcagcgagggcagcggggtatcccagctggtcaagaagctgtgtgacggtgtggtgcggctggacatggctgcccccggcaccggcgtggacagctataacgtttcggtggcggcaggcattatcctgtacgagatccagtcgcagcgcgccgtagaagaataaaacaagcggtaaactccatccagaacagtgggagggacaaggatgccgaacaatacaaatgaacgcaagggcaagcaggcgggggagctctcggcagaagagcggttccgcaactttttcagcactagtgtgatcgatctgcccgaggagatgacccgccgggacgtgcctgccccggtggaggaaaagcccaaggccgggctgctgggcaagctgttcagccacgacaaggaagggacgcccgcccccgcacagcctgtgctggagatccccaccggtgagatcctgctgggagcagatgcaaagccggtacagccggagcaggaggacatggcgctggaactgcgtaccgcagaccctgttccggcaatgccgttgcagcccgccagcccagagcctgccaaggcagttccggcagagccggtgcctgcacccaaggcggctgctgctgtgcagccggagccggaaaagcccgcgccccagccggagccgcagcctgctgcggcccccaaaaagcagtctaaggtgaagaacgccccggagacgctgctgccgcaggaagagctggaacagcgggagatgcagcagctgaaggatatgctcaacggcatgagcggcaaggcaaagcctgccccgcagcccgcaaaacccgtgcagacagcaccgcagcccaaggtgcagcccgcgcctgcacagcccgccgcagagccggagaaagtcccggcaaaggctgctgcacagaagcctgctgaggagttgccgccggtggtgtttgccagcgcgccggcagacccggaaacgctgccaaaaaagccagagaaaaagtctattttccagatgttcggcacggcagaggacgaaaagcccgctgcccgcaagccggaaaaagaggatactatgagcctgcccctgctcccgctggagcaggacggcacccccgcagcggagactgccgcctatgtatccgcaccggcagctgccgcgaccccggcacagccggagaccgcaccggaagcgcaagcggctgcccctgccgaggaaactgtgccggaatccaccaccgacaagctgcaccacatggctgcagaactgaccctgcggtgtgtgttggcgggcattctggccgtggtgctgctgcaccttgggctgacggcagagcgtctgctgccgccgctttcggtgctggacccggacgctgccccggcggcgttctatgccgccaatctgctgctgtttgccgccagtctgtttgtgggctacccggtgctgcgggacggtctgaccggtctgcgcggccgtcccagtgcggacaccatgcccgcgctggctgctgtggcagcgctgctgcaggcggtggtggccatgctgaatgccaacgcctaccgtagcactgagggcatcggtctgctgaccggtatggcggcgctggggttgtttctggcgctggtgggcagccgggtgatgctggctgccgtgcagggcggctacgcgctggcagcagagggcggcgaactgcggggcgcttaccgcacccgcgataaagacctgatccgcgccctcgcccgggatctggagcagaaggacccgtgggtgctgctgagccgcccggtacagaccgccagcaatgactttgtggagcagagccttagcgagcgcgccagcgagcgccgcgcccggaaggtggcctgtatcctgctggcggcggcagtgctcagctgcgtagccttcctgctgttcggcggcgggatcaactgcgccgtggctgcggctgctgccgtgctgtgcatgggcgcacccctttcctcggtgctggtgcccggtctggcggcgctgcggctgcaaagagcggctgctgctgtgggcgctgtggtgcccggctgggcagccattgaggagctgggcggcatcgataccattgagctggacgccgatgacctgtttaccgccgacagcgtaacgctggaggatatccgcatcttcaagggcggccgcatcgaccgcgctatcctgtatgcagccagtgtgctgaacgagagctgcgacaccctgcgcgggctgttcagccagatcatcgaggaccgcaccgatatcctgttcccggtcaaggatctggagcagcacaccgggctgggcttctcggcatggtgcgacaataaccgcatcctcatcggcacccgccgctacatggagcaggagggtgtgaccctgccggagcaggattacgaggacggccactccaaaaacggcgagctgcaaattttgtatctggcagtgtccggcaacctgcacgccatgttcgtgctgcgctatgtgggcggccgcaatgtggcacgcagccttgcctccctgcaaagggagaacatccgtctgctggtcaccagcaaggaccccagcctgacggcacggcacatcaccgaggcctaccatctgccggagggcatggtcaccgtgctggacggcgaccagagtcaggccattgaagccgccgatgctgccccggaaaagcccgactgctgcctgtaccaccaccggggctttgccagcctgaccggcggcttacaggctgcagatcaggcacagaatgccgagaccagcgctactacggtgcagctggtgtcggtgtgcttctcggtgttcattgcggtgctgctgacctatgcgggcagcatctggcagctgtccatcgccacggtgctgatgtatcaggccgcatggagcgccctgagcatcgccgtctgcgccctgaagcagcatagctgaaagctttcgcatattacaaaacgggctgttgcacatggtcagcgacctcgccctctcaggcgctaacgcgccagctctcccaaagggagagcctttggcagcccacgcaaacttcatctctttgccaaggcctctccctttgggagagctggatttgcgaagcaaagacggagagggcgagcaagctaaagtaaaagtatctgtaaataaatgctgactttctggatttaggagcgaatataaaacgggctgttgcacagaaccttgtgcagcagcccgtttttgtgatcttattttattttcttgcgcttttcgtagtcgttcagggcggtcagcgcctcgccggaaaggggaatgagcgccagcatattgaagatggtcatcagcccgatgccaacgtcgcccagatcccacaccacggtgtaggcctgtgtgccgcccaccagcagcatggccagcgccagcagcttgtaggcggtctggctccaccagttgtcgccgcacaggtaggccacattgccccgggcgtagtacagcacccccagaaaggtggagaagctgaacagcgctaagatcaccgcaatgaacacgatgccaaagccgcccagatggtactgcatggcggtctgcaaaagattcatgccggtcagcccggcggtgatctcctgcggcaccagcagcatcagaaaagcagtgcagctgcagatgaccacggtatcgatcaatacgcccagcgcctgtacaagacccatctttaccgggtcgtcgcactccgcagcggcagcggcgcagggggcagagccgctgcccgcctcgttggagaacagcccgcgcttgacaccgttcatcagcaccgcgccaaagccgcctgcggccacctgacgcaggccgaaggcctcggcaaagatgcgtgccagcacggcgggcagctgccggagattcagcaccacgatgcccaccgtgatgacaaagtagcacaccgccatgaccggcacgatgaagtcaaggcttttcacggtggcattcttgcgcagcacgatcaacgctgccagcagggtaagcaccacggtggtggccagcggcgggatgtgaaaggcgttttcaaaggcagagctgaccgagttggagatgacttggctgataccgcaccagcagatcagaccggacactgcaaacagcgctgcacacacagagcgcttgagctttttgccccgtttgcgctcggccagcacatggagatagtaggccgggccgccgcgccagccgccgtacagcgggtccggcacgcggtatttctgtgccagagtggactccacaaaggaggtggaagcacccagcagcgcagtgacccacatccagaacaccgcgcccgcaccgcccgcggaaacagcggccaccacgcccacaaggttgcccatgcccacccgggtggcggtggagatgaccagcgtctggaaggaggaaagcccgcccgcagcctgctttttttcgcacactgcgccgatcatatcccggaatagccgtaccggcagcagccgggtgcgcagggtaaagccgataccggctgcaaacagcagcaccaccataaaggagatgccaatgccgcccgccaccggcagggtgaacaaatcgccccacagcaggcggtaaaacgcttcgatcagatcaactatcaagaaaacagcctcctgtacttttgaaaaataaagtcgttacttcattatagtacagcatagaagaattgtaaaatctaaaatattgatagaatagattgaccaaactgaacgcagtgcagcaaatgcaaaataataattccactgaatgtgccgcagctcggcagcggagggcatttaaatcgtcctacaaaaaagggactgccgcacggtttgtgcagcagtcccggaggaagaagcgcctttcagcgcgggaaaagcttacaggatgtcgatgtattcaccggccagtgccttgttcatgctgcgcacggcgcagaacttgccgcacatgctgcaggtgtcgctgtggtcgtcctcgggcaggcgggcgtcgcggatggccttggcggtctcggggtccagcgcgcaggcaaactgtgcatcccagtccagtacgcggcgagcatcgcccatcttgtcgtcaatgtcccgggcgtgggggatgcccttggcaatgtcggcggcgtgggcggcgatcttggaggccacgatgccctgctttacgtcatctacgttgggcagagccagatgctcggcgggggtcacatagcacaggaaggctgcaccgctggctgctgccactgcgccgccgatggcagcggtgatgtggtcgtagccgggggcgatatcggtgaccagaggtcccagcacatagaagggggcgcccatgcagatgctcttctgcacctccatgttggcagcgacctgattcaggggcacatggccggggccttctaccatcacctgcacgttgtgcgcccatgcgcgcttggtcagctcgcccagacgcaccagttcttcaatctggcacacgtcggtggcgtcagccagacagccgggacggcaggcatcgcccagagagatggtcacatcgtgctcggcgcagatctcgcagatctcgtcaaagtgctcgtagaaggggttctcgttgccggtcatgctcatccacgcaaacaccagagaaccgccgcggctcacgatgttcatcttgcgcttgtgcttgcggatctgctcgatggtcttgcgggtaataccgcagtgcagagtaacaaagtccacgccgtcctctgcgtgcaggcgtaccacatcgatgaagtcctgtgcagtcagttctgccagatcccgctggtagtggatgaccgaatcgtacaccggcacagtgccgatcatcaccgggcactcgtgggtcagcttctggcggaagggctgggtgttgccgtggctggacagatccataatggcttctgcgcccatgttcacggcgctcatcaccttctgcatttcaatgttgtagtccttgcaatcgcgggagacgccaaggttcacgttaatcttggtgcgcagcatggagcccacgccctcggggttcaggcaggtgtggtgcttgttggcggggatggctaccttgccctcggcgacccactggcggatctcctcggtggtgcggtattcctttttggctacgatctccatctccggggtaatgatgcccttgcgggcggcatccatctgggtggtataagtctgcatacgctgtgttcctccaaatgacagtttatctctgaacagcagggtgctggtcatacagtgatgtgggagcgaaccgccggtcgggagtttctccgaggaccgtccgctggggtgggaccctgctgccgcaggcagtagggcgggcgatggaatggcccgattcgtgtccgaggagaaagctcccggccagcaggcaagtagccgccattcagaaaaaacagtatgctctggatgccggcacctgcgcaaaatacgcttttcatgttggttttctccatgaattttgtaacgcggcccaaggtggtgcccccggtttgccgcggtatgatagcttactttatgatctgctccgaaagggctcgcagctcccggcactcggcctcgatgtcctttgcggcaaagatggcacttaccagcgccacgccgtccacgccggtgcccttgagctgcaggatgttctccttgtggatgccgccaatggctaccaccggcacatccacggcgttgcagatgtccagcagggtctgccggggcatctcgctcacgtccgtcttggtgtgggtggcaaataccgcgcctacgccaaggtagtccgcgccgtgcgccacagcgtccagcgcttcctgcaccgtgtgggcagaaacgccgatcattacaccgtcgcccacgcgctggcgcacctgtgcggcggccatatcgtcctgccccacatggatgccctcggcgtggcactgcaaggccacctccacgttatcgttgataaacagcggcacaccgtactgctggcacagagcgtggatttggatggcttcctgtaaaaaatccgcgtcgcccagctgcttttcccgcagctgcacgcaggtggcaccgcccttcagggcactttccacctgctgatacagagtctgctcgcccacccatgcgcggtcggtcaccgcgtacaggagcatggtgtgtttatcgcacttcatagttcgcgcctttctccagctgttcgggggtcatgttgtaaatggcatcaatgatgtaattgcggtaggtggcgttgccatcctgcggggtgagccgctggtgggcgatctcacccgcaagacccatggcgcacaccgccgcagcagtggcctccagcggctggtcggggttggcagtgacaaaagccgccgtcagggcagaaagctgacagcccgtgccggtgatgctgctcatcatggcgttgccgttgcggatgcagtaggctttttgtgcatcggctacgatgtcaatagcaccggtaatggctaccaccgcaccggtgcgggcggcaaaagcctttgcaaaggccacagcgttgtccagattctcctcagtcaccttgtcggccacgtctgcatccacgcctttggtggtgcctgcaccggaggcaagggtcttgatctccgagatgttgccccggatcaccgtgaactgcacctcccgcagcaggcggaaggcggtgtcggtgcgcagatgggaagcgccggcacccaccgggtccagcaccacagggtgacccagctgattggcctttttgcccgccagcagcatactggtgacggtgcggctgttcagtgtgccgatgttaatgttcagcccgccgcagatggcggtgatctcctccacctcggcggcatcgtcggccatgatgggggaggcaccgcaggccagcaccatgttggcgcagtcgttcacggtgacatagttggtgatgttgtggatcagcgggcagcggctgcgcaggttctcaaaggcggtcttgagcattctggctacctccgctcaggaaaggctgttctgcatggagcgcagagcgccggagcgctgcaggctgaacaccacagcaccggcgatcaccgcacccacggcggtggagatgaggaagggcacaatataggcgtagaaagcgatatccgcagcgctcttgcccatcaggaagatggccacgggccatgcgcacaggccgcccagaatgctggtgccgaacacctcacccaccacggtggcgatcaggtttttggtcttgtggtatgcaaggccgcacagcagcgcaccgaacatactgcccgggaaagccatcaggctgcccagacccagcagattgcgcagcagggaagccacaaaggctacgcccacgccccaccagggccccagcagaacggcgcacagcacgttgaccatgtgctgcaccggggcgcacttgctgccgaacatgggaaagctgaacacgctgcccaccacgcacagggcacagaacataccggcgagggcaagctttttgacagagagattcttcatgataaattagctccttttcaaccatctgcggcagcgcaggacgaataccggcgctcccgcaacaaaacagcccgtgcccgccgcaaggcgggaacaggtacggaaggtgcggtcgaagcttactggcttcctctcacgccggaacacggcttcccatcgctgcattcatccaaggctcagggcgctccccctcagccggctgcggaacctccgcagaggtacaaaaaaacaggaggggcccggcacggctcctcctgcaaaaaatcataaagggtatgacttcctacggcggcattatccgcatcaggtaaaagggtcgaagcttgccatacttcctctcagcccgctgcacgagctcccctgtgtttgattgtgactgtattctacacctctttccccaaaaatgcaagaggggagatagaaaccaaagccgccgtgcaggggtctgcgcggcggctttggtcacagaaaggagaataatatgaaaaagcagaaaaagtcgggttaacccatggtcacctgcaccgttacctcagtcccggcggcagccagcggcagaacgttgccggagatggccttaccgtccacagtaacggccttgatgccgtgctgcaccccggcggcgttatccactgtaatgtggtacaccgcaccgcggaagcggcgggtcacggtaaagccggacagggtgtgaggaatgcaggggtctaccttcaggccgtccaaggtgggctggatacccagaatgtactggctgatgttgaagaaggtccatgccgctgtgccggtcagccagctgtttttggcttcaccaaaggtgggggcgtccttaccggctaccatctgactgtaaacgtagggctcggtgcgatgaatctcagaaatgtcctcgatgtaggcggggcaggtcttgcggtacaccgcaaaggcgcggtcaccgtggccaagcgttgcctcggcgcagctgatccacgggttgttgtggcagaagataccggcgttctccttgtatcccggaggatagctggagatctcgcccagattcagctgatagctggtgtaggcgggctgcagcagcaccacgccgtatttggtgtccagccgctcctccacgctggcaagcgcctgcgcggcctgtccgctctccttgccgatgccggccatgacgcacataccctgcggctcaataaagatctgaccctcggtgcactccttgctgccgacgggcttgccgaaagcatcgtaggcacggcggaaccatgcgccgtcccaaccggcggtcagggtggcctgctccacggcatcaatgtgcttgcgggcggcagcagcctcctcggtcagattcagatggtcgcacagctgggcgtattcgtggccgtacttgacgaacataccggcaatgaaaacgctttcggccacgggaccctcgctggggccggtgatctggaagctctcacccgggtgctcggagaagcagttcaggttcaggcagtcgttccagtcggcgcggccgatcagcggcagaccgtggggacccagatgggtgcaggtaaagttgaagctgcggcgcagatgctccatcagggtctgcgccttggtggcgtcgttatcaaagggtacctgttcttccagaatagaccagtcgccggtctcccgcaggtaggcggcggtaccggcaatgagccacagcgggtcatcgttgaagccggtgccgatatcccggttgccctttttggtcaggggctgatactggtggtaggcgctgccatcctcaaactgggtggcggcgatatccagaatgcgctcccgggcgcgggaggggatgatgtgcacaaagcccagcagatcctgacagctgtcccggaagcccatgccgcgtccggtgccgctttcgtagtagctggcagagcggctcatgttaaaggtgaccatgcactggtactggtgccagatgttgaccatgcggttcagcttttcctcgccggattccagatggtaggtggacagcagctgctcccagtgggtgcgcagggcggcgcgggcggcatcgacctgtgcatcggtggcgtagcgctccatcatggcgtgggcgcgggtcttgttgatgacgcccggggcaatgaacttttcctcctgcgggttctcgatgtagcccagaccaaacaggatgctgtggctctcgccgggggcgagggtcaggtgaatgtgcaacgcacccaccggtgcccagccgtgggcaatgctgccggagcagtgcccggcgcggacggcctgcgggtctgccgggccgccgtacacgccgcaaaaggcatcccgggtggtgtcaaagctgtccaccgggcagtttgcccagaacacggcgtagtggttgcggcgctcgcggtactcggtcttgtggtagatcacgctgccctctacctctacctcaccggtggagtagttgcgctggaagttggagctgtcgtccacggcatcccacaggcagaactccacatagctgaacagatccagctccttgacaacggtgctgccgttgcacactgtcacccggtccagctcacaggcatcccccttggggacgaacagctcctgccgggcggtcacaccgtcctttttgccctccagaatggtgtagcccagaccgtggcggcagctgtaactgtccagcggggtcttggtgggctgccagcccgggttccatacggtttcgccatccttgatgtagatccggtggccgtccatgtccagcggggagttgttgtagcggtagcgggtcaggcggcgcatccgggcgtcccggtaaaagctgtaaccgcccgctgtgttggagaccagactgaagaagtcctcgctgccaaggtagttgatccagggcaggggcgtctgcggggtggtgatgacatattccttattctggtcatcaaaatatccgaacttcataatgcttcctccttaaaactgcgccttgtcgggcgggcagtgtgtcgatgaacgaaaacgattaagacactgcgaaagaagcaatctcatcacgctaagcataccgtatcccacccaaaaatgcaagagctttttgcaaaaatctcaacggaaattttaaaataatctgcgaagccccggcggttttcggggactttcggcacggcgtacaccggcgaaagggcaaacgaaagacccgaaaccccattttaaaagtaatatatacatacggcctccggcaccgaaaaccataacgaaactgcaacgaaaattttttcgttttaatcgaaatgtaacgaaagtgaatcgagatgcacaattcttacaggccgtattggaacaaaatgccaaaagtgatgcagctgagctaaaacttttgcgtttccgcttgatttttggtgcagaatgcgatatattgaggttgcgaaaacgattaaggaactcgcgagaaacatcccgctactcctatcctcggaaggaggctaaaagatgccgtccctgaaggatctggcgaaagaatgcggcgtatccgtcgcaaccgtcagcaaggctttaaacgaccagccggatatcgcaccggccacgcgggagcgcatccgtgcagcggcccgccgcatggggtacctgcccaacgcagcggcccgggcgctgaaaaccaaccgcacttacaatcttggcgttctgttcgtagatgaaaaacagagcggcttgacccacgagtacttctccgcagtgctggacagcttcaaggtagaagcggaaaagcgcggctacgatatcaccttcatcaaccacaacatcagcggcaagtccatgagctatctggaacattgccactaccggggtgtggacggcgtggtgatcgcctgtgtgaacttttacgatccgcaggtggtggaactggtcaacggcgatgtgccggtggtgaccatcgaccatgtgttcaacaaccggatggcgatcctttcagacaacgtggcgggcacaaaggctctggtacagcaggcatgggcctgcggacaccggcgcatcgccttcatccacggcgaaaagaccgccgttaccgagaaccgcttggcaggcttctatcaagcctgcgaggagctggggctgaaggtgccggaggagtacgtccgctgcggtgtgtaccacgatgtggaccgctgcgcagaggagacccgggcgctgctggcactgccgcagcggcccacctgcatcatcttcccggatgacttttccgcactgggcggctacaacgccctgaccgaagcggggttgagcatcccggaggacatctcggtgatgggatacgatggcatctatctctcccgggtagtcaaaccctcgctggtgacctaccagcagaacacaaaatcccttggcaggctggcagcggataagctgatcgagctgatcgagcatccgcgtgtgactctgccggagcagatccgggtgtccggcaaactgctggacggcggctccgtccgcatcctttaacaaagacccatgactcccagcgcggagtttttgagaatgaattttttaattggaaaaccatgaaggaggtttacccttatgaaaaagatctctcgtcgtaatttcctgctcgcttccggtgtcgtgactgttggtgctgctctggcagcctgcggcggcggttcttccagcagcactgctgcttcctctgccgctcctgcatcctctgcagctgcttctgctccggctgctgccgagggcaaggtgctgaacatctggtgctggaatgatgagttccagagccgcttcaacgactactatcccgaggtcaaggagatcgcagccgacaagtccaccaccaccctgaaggacggcaccaccgtgaagtggaccatcaacgccaacgagaacaacaactaccagaacaagctggacgaggctctgctgaatcaggactccgctgccgatgacgacaagatcgacatcttcctgattgaggctgactacgctctgaagtatgtggattccgactacgttctggatgtcaagaaggatatcggcctgaccgattccgatctggccggccagtaccagtacaccaaggatatcgtttctgtggacggcagccagcgcggcaccacctggcaggctaccccgggtctgttcgcataccgccgcagcattgccaaggaggtgctgggcaccgatgaccccgccgaagtgcagacctacctgtccgactgggataagttcaacgatgtagctgccaaggctgctgccaagggctacaagatgctgtccggctttgacgatgcataccgcaccttctccaacaacgtctccgcaccctgggtcaccggcaccaccgttaccgtggacgagaacctgatgaagtgggtggaccagaccaaggagtacaccgacaagggctacaacaacaagtccagcctgtgggacagccagtgggcttccgatcagggccccaccggtaaggtgttcggcttcttctactccacttggggcatcaacttcaccctgctgggcaactctctggcaactcctaccgctgagggtggcaaggaagaggttggcaacggcatctacggcgactacgctgtgtgcgaaggccctcagccctactactggggcggcacttggatctgcggcgcagccggcagcgacaaccttgagaccatcaaggacgttatgctgaagctgacctgcgatgaagccatcatgaagcagatcaccatggatacgcaggattacaccaacaacgagaaggccatgaacgagatcgccagcagcgattacaagtccgacttcctcggcggccagaaccacatcgctctgtttgcagaggctgcaaccaagatcgatatgtccaacgccggcccgtacgatcagggcctgaacgagagcttccagaacgctttcaaggattacttcaccggcaacgtgcaggaggatgccgccaaggcaaacttcgagaccgccatcaaggagaagtaccccgagctgaccgacgtggtatggcccgcataagcggttttactccgaactgaaaattgaagcaaaggggcgggcggcgtatctcgcccgcccctttggttttgctgtgacccggcaggagggagatctcatgggagaaaaaacaaagaagaaagggtcgatcagctacgcgaaatggggctatatcttcattgcaccgttttttatcatcttcgcggtattccagctgatccctctggcatccaccatctattacagcttttttgagtattaccgcagcggtctgaagatcatcggacccaactttgtgggtctgaaaaactacatcaccctgttcgcgaccgatctgcccaagtatttcagcaacacgctgatcctctggatcatcggttttatcccgcagatcgtcgtctcgctgctgctggcggcatggttcaccgacctgcggctgaagctgaaaggacagaccttcttcaagacggtcatctacatgcccaacctgatcatggcctcggccttcgcaatgctgttcttcgccctgttctcggataacggcccggtgaacgcagtgctgctgagcatgggctggatcaagacccccatcagctttttgaataccgtgtggggcaaccgtggccttgtgggcctgatgaacttcctgatgtggttcggcaacaccaccattatgctgatggcagccattatgggcgtggatcccaccctgtacgaggctgcggaactggacggatgcaccccgaaccagatgttctggaagatcaccctgcccctgatccgccccattctggtctatgtgatgatcacctccatgatcggcggcttgcagatgttcgatgtgccgcagattttgaccaacggcaagggcggccccgaccgtacctccaccaccatgatcatgtacctgaacaaccacctgttcagcaagaactacggcatggccggtgcagtatctgtggtgctgttccttgtgtgtgcagtgctgtgcgtcgtcgtgtacttctcgctgaccaaggaagatgacggcctgaccaaggctcagcgcaaggaactgaaggcagccaaaaaggctgctgccaaaggagggaaataagtatggcacatacgcctaaaaaccagtccgaaaaggcgatcttgaccgcccgccgtgcgtggtgctatctggtgctggtgctgatcagctttctgtgcctgttcttcttctatgtgctgatcatcaactccacccgcacccacttcgagatccagaagggcttctcgctgatgccgggcaagtccatcatcacaaacttccgcaacgtgcttacggacgccaacatccctgtggtaagcggcatccgtaacagcctgctggtgtctgcctgctcggcagcgctcagcgtttacttttcggcactgacggcctacggcatctacgcctataacttcaaattcaaaaaggctgcctttgccctgatcctgctcatcatgaccatgcccacacaggtgtccgcactgggctttctgcagttgatctccaagatggggctgaaaaacagcttcatcccgctgatcgttcccagcattgcggcacccaccgtgttcttcttcatgaagcagtatctggacgcatcccttcccatggagatcgtggaagccgcccgcattgacggtgcaggcgagttctatacctttaataagatcgtactgcccatcatgaagccggctctggctgtgcaggccatcttctccttcgtggccagctggaacaactacttcatcccggctctggtgttggacactgccgacaaaaagaccctgccgatcctgatcgcccagctgcgcagcgcggacttcctgaagttcgatatgggcaaggtgtacatgatggtggccatcgccattctgccggtcatcgtcgtctacctgctgctgtccaagtttatcgtccgcggcgttgcgcttggtggtgtcaagggctaaaattgcgaccgccgcctgcggcggaaacagggagcaatttttggcgcagcggtctgcaagacgcgagacccgctcaagggtcgaagcggatgcagggcaccgcaagaggttttatacgactgaataataacacttttatttctctgttacagcatagcaaagcccccgggggtcacaccctcgggggctttgtgcgtggtaaaaaacttaaatcaagatcccatcgcaatggtcgatctcgtgctggatgatctgcgccgtccagccggtaaaggtcttgatgcgcggtttgccgtccatagtctgatactgcaccttgatgctctgccagcgctttgtttttcgcacgccttccagcgaaagacagccctcctcggcttcgtactggccggattttttcaggatgaccgggttgaacagcaccagatacccgtcctcggcctccactgcaatgatgcgcttgagcacgccgatcatgttggaagccatgcctacacagccatcggcgtgggcggtcagggtctccagtaagtcccgcgcgacaggggcatcctccggggtggcaggggcggacttctgcgccagaaacagcgggtcgtgcatgatgggctggatcatagtaaaatctcctttattcttcagtgcagcttaaaaagatgcctgccagcagtccggcagcagccgggagcacccagccaaagcccagtgccgccagcggcagggcgttggcaagggcagaaagtgtgccaagcggcagcgcggcggcaatgctctgcacggcagtgcagccgatgcacagcggatagacccggcggcgctgttccaacccgggcacgaaggaaagcgtaatcagcacaatggctaccgggtacagggcgttgagcaccgggacggataaccgtaggatatctgccagccccagatttgcgatcagcatactggcagcggcaaaaaaggcggcaagagcagggtaggggatgtggggcagcagggtgtggaaatactcccccacacaagcgatcagccccacacaggtgttgaagcaggccagcataaagatggcggcccttgagcgcttgcgtcaatactgtcccctctttcctgcgccggtgccaaagttgcaccgcatattgtatccagtttacactggatgtaaattcatgtcaagcatacgacggttgaataaaagtatatacattgaaagccgacccgccgcaggtggtgcacaggtcattcccctttgcggggcggtatggtatactataccttataataggcaggggaagagggcagtttatgaagcagaacaagcagttttttcgccgtctgctggcggtggcgttctggctggcggtctggcaggccgcagcgatggccatcgggcaggaggtgtttttggtatcgccggtgcaggcgctgcgcaccttggtgcagctgctgccgaggacggatttctggcagcgggtgggcttcagttccgggcgcattttgctgggctttgtgctgggcgcagtggtcagtgtagtgctggcggtgtgcgccgcccggtggagcgccgccgacgcgctgctggctccggtgatgcagctggtcaaggccacaccggtggcaagctttatcattctggcactggtctgggtgcggggcagcgccctttcggtgcttatcagctttctgatggtgctgccggtgctgtacggtgcggtgcgcaccggtattgccggggcagacgtgcagctgctggaaatggcggcggtgttccgtctgcctgcaggccgccgcctgcgggcgatctggctgcctgcagtgctgccggccttccggcaggggtgcagcgtggcgctgggcatctgctggaaaagcggcgtggcggccgaggtcatcggcttgcccaacggcagcatcggcgatgcgctgtaccgtgccaagatcaccctttccaccggggaactgtttgcgtggacctttgtcatcattctgctgagcgcaggctttgaaaagctgttcctgtttgcactggataaggccgtgggcgcagtgctgggagaggagggggcaaaatgctgaagatccaacacctgacaaagcagtttggcgcggtaccgctctttactgacctgtgcatggaggtggacactcccgcggtgctgtgggcacccagcggctggggcaagaccaccctgctgcgcatcctgatggggttggaacgccccaccaccggcagcgtggagggcgtaggccgggtggcggcggtctttcaggaggaccggctttgcccccagctgaacgcggtgcagaacgtcaccttggtgctgccgggggcggaaaaccagtacaaagagcaaattacaagcgattttcaacaacttggaatggatactgccgccttgcagctgcctgcccgcaggctttccggcgggcaaaagcggcgggtggcgctgctgcgggcgctgtgggcacccagcgacaccctgctgttggacgagccctttaccggcatggacccggacaccctgcagcgggcggcggcgctgctgcggcagcgctgcgcgggcaagccggtgctgctggccacccacgatgaaagcgctattcgcgcccttggctggccggtggtggagctgaaaaagctgggacgctcttgaatgccctccgctttgctctgggcatgatttatggaatttttgtttgttcaatatagcttttgtcgcgctctgcggagcgcgacaaaagctgcttgttttaaaattacctaaaaagcaaggacgtgcagcccgcgggctgcacgtccttgcttatagaacattctttaactgaacaggcttttagtgttgtgagagtatacggacagtactaaaccgacacagatatacagcataagcaccgagctgccaccggcggagtagaagggcagggtgacgccgatgaccggcagtacccgcagattcatgcccacgtttaccgcgatctgcgccatcagagcaccgccgataccggcgcagatgtagctgcccagcagatcttcgctgcgggcaccggtggcaaaggtcttgatcaccagcgccagcagaacgcccagcaccacgcagcagcccacaaagcccaccacgttgccgatccagctgaggatgaagtcattgtgggcgttgggcacgctgtaataccggccggtgaataagccgttgccgaagatgccgccggagcccagcgcgatctcgccgcgctgctgctggtagatgatgttcttccataccgtctcgctgggtgcccagccggtggtgttttccgggtccagcaccgccagaatgcggtaccactggtaccccttgccgatcttatcgctgaaaaaggcaaaggccaccgccacggcagcgcccgccgccgcaaaggctgcaaagatatacttccagctcagccccgccgcaaacatcatgcagcagccgatgatgccgtagatgatggcggtgccgtcatcgccctgcacatggatgatggcaatgggcaccagcagatgcagcagcagctttgccagctcctttggttcattgatacggctgcgcacgttgttcaggtgcatggcaaaggtcaggataaagctgatctttgccagctctgtgggctgaaaggtaaagccgcccagtttataccaggagtagttgtcggtatcgccggcgttgtagccgatggtcagcggaccgatggatacgttgcggatgaccagcgtgggcagcaccagaccccacgtcagcacaacgtgcaccggccacacctttacaaggctgcggtagtccacgcaggagagcagcagcgcaatcacgatgccaatggcggcagcgcccgcctgcaccagtgcgcggcggtagtcgccaatgccgatgatggcaccggtcacctcatcggtggcaaagccgttgccctgcttggctgcccaggaggacagtgccagcaccgccatcacgctgctgaaaatgcacagcagcagatacatcttatcggtgcgcttaaaatattgtcgaatgctatccaaagaaagcaccgcctttcgtcagaacagtctgccgggacgtgcctgcgtacaggcgataaaaacccagcatactgctattatacacaaacctttgcgccaatgcaatgcgccgggtgtgacggaatggtaaaacattgccgggatgcttgacaaagctccggcagcagcctacaatgaacctgtgggcgcagccttgcgcacaacagccccggcggtgtgccgggggagaggaacggaaaagaagaaatggaacatacgttttatcgccgtctgctcagcgcggtgtgtgccattgcgctggcctttacggcagtgtgcccggcagtggctgccgcgccggaggaaaccaccggcaccccccagaccctgaccgcttccgaggtaaaggagatgcagcagacggatgccgccgtcaccgccctgaccgacagtgccgcttacgccggaatgtcggaggaagagcgtcaggccgccgcgctggcgcagctggacgaactggcggcgcaggggcttgtgaaaaaggacagcatctatgtggatgcgaaaaacggcatggtaagctttacttacagctgcggcgcactgggcggtattctgctcaccgacaccgagagcgaggcggacgccgccctgcccgggccggagatggagaatgcgcccgccctgctcgctgccgagaacggcacggtgggcaatgcggtcatctactatgcctttgataatggagtcaacagtaaccgctacccctactattcttatatgaaggactactggaacggctatgggctggacacccatctggacatgatggtgactgtctccgacctgaagcggatggcagactacgaccttgccgtcctcagcgcccacggcgcgtactatacctatgagtacggctggctgtggaaaaagcaggccaccgcgcccatcatcctgctgctggaaaaatctgatttctggaacgacctgcgctacggcttggagctgcttagccaccgggtcatcaaggtgaacggctgctacgccgtcaccggggactttttcggcaatgcctaccggggcggtaagctgaacggcaccatcgtactttcggagacctgcgagttctacggacgcagcggccatgtggacaccgctctttcggacgggctgctctccggcggggcaaaggccgtggtaggctttgtgaataacgtatacagtgtgtactcccgcagtatgctgtgggcgaccgtgaaccgcatgatcgagggcgagacgttgcagcaggccattgattacggccttgaggtctatggcgaaaacgacatcgtgtggtatctcaaccagaacaccgggcggcatccccactcggcggcgtcctatcccatcattcagggcgatgccgctgcccggttcaccgcgcccggcatggcaacgaacagtgccgtagagcagcagacccctgctgccgcctgaccattgcacttttgtgtgttttatattatacttagggatggcagagtgtctgccatcccttttttgaaacgattgaggtaaccttcatgtcagaatatatcacccattcccgcgccgagacggtggcgctgggcaagcggatggccgctgtgctggctcccggggcactgatcgcctttaccggcggtctgggcgcgggcaagaccgcctttaccgagggtcttgccgcgggtctgggctgcaccgacccggtgtccagccccacctttgccatcgtgaactactaccggggcccgcgcccgctggcgcactttgacctgtaccgcatttctaccgagaacgatctgtgtgcggcaggcttctacgattatctggatcagggcgctgtggtggcggcagagtggagcgaaaactttgccgacctgctggcgctggaaaaccccatccgggtgaacatcgaacgtctggacgataccacccgcaagatcaccattgagggggtgacggtatgaatattctggccgtggatacggcgggcaagaccgccggtgtggctctgctgcaggatgatcgcctgctgtacgaggtatatctggacggcggcatgacccacagcgaaacgctgatgcccatgatcgacacctgcttaaagctgtgcgggctgacctgtgcggacatcgacctgtacgccgtcaacgcaggcccgggcagctttaccggcctgcgcatcggactggccgccgtcaaggggttggccttcccgcgtgagacgctgtgcgccccggtgtctaccttggaagcgctggccgctgcccacaccggcgagggcacggtgctctgtgcactggacgcccgccgcgcacaggtgtacagtgctgcatttgaccttgccacccacacccgtctgctggacgatgacgcccgggcggtgacagatctggcggattttgtagaaaattgcaaaaagcccctgttttttgttggtgatggcgcgggtctgtgctataataaatacagcaatgtgccgggcgtgctacaaacacccccggcgctgcggggcggccgtgccgctgccgtagcacttgtggcaaagcagatggccgcagccgggcaggctgtgctgccggaggcgctgctgccggactaccaccgtctcagtcaggcggagcgggagcgggcggagcgtctggctgccgaagccgcagcaaacaaacaataaaagcggaactgtgaccactcacagggaaaggacgtttttccatggcaaaacccatcgcacttgccgccgaccacggcggatttgaactgaaagaggctgtcaaggcacatctggaggaacttggtctggagtatatcgactttggcacccacagcaccgacagcgtggactaccccgatatggctgtgcccgcctgtgacgcagtggtgagcggccagtgcgagaaggcactgctgttctgcggcaccggtgtgggcatcagcatggcagccaacaagatcaagggcatccgcgcctgctgctgctccgacagcttcagctgcgagtatacccgccgccacaacgatgccaacgccctgtgcatgggcggccgcgtagtgggcgcaggccttgcctgccagctggtggatatcttcctgaacactgagtttgagggcggccgtcatcagcgccgcatcgacaagctgaccgcactggaaaaccgctgattgaaatttttgtaatttcacagagaagcctgcactgcaagcttctctgtgaaaaaagctatttgtgcgcccatcgggcggacaaggccacagatcagtacccgatagaatgttctatataaattaaggagcgtgtttttatgaccccgatgatcgttgaacatccgctgctgcagcacaagatcagcctgctgcgcaacaaacagaccggcaccaaggagttccgtgacctcgttggcgagatcgcaacgctgctgtgctacgaggctacccgcgatctgccgctggaagaggtggagatcgagacccccatcaccatggcaaagaccaaggtgctggcaggccgcaagctggctctggtgcccatcctgcgcgccggcatgggtatgctggacggcatgctgaccctgctgcccgctgccaaggtcggcttcatcggcctgtaccgcgacgaaaagaccctgcagcctgtggagtacttctgcaagctgccgcaggatatcgccgagcgcgatgttctggtgctggatcccatgctggctactggcggcagcgccatcgacgccatcacccagatcaagaagcacggcgcaaagcgcatcaagttcatcggtctgctgggcgcaccggagggcatcaaggctctgcacgaggcacaccccgatgtggacatctatctgggcgcacaggacgaccgcctgaacgagaatggctacatcgtgcccggtctgggcgatgcaggcgaccgtatctacggcaccaagtaaaacatatctataaaaaacaatgccggagcatcagcgctccggcattgttttttatcttacatctcgctgctgcgcagaaaacgcaccagcaggggcagctcatacagcagcatcagcagccagcccaccgcgtagctgaagggcaaggcttcgatgtccatcttcatcaccagcacaaacagtgcggcggcagccacacggccgcccatgttcagcatactgctgttcagggtgaccttcaaatcgcccatgccccggaaaaagccctgaatgccgttggtggcggcgggcatcagataaaacagcgagatggtgcgcaagaaccgcacgccaaggtccaccacagcagggtcggcggcaaacagccggatgatgggctcggcaaacagcaggcagacaccggtaagtaacagcgcatagacgaattcgatgcgcataccgcagtggtagccctgccgtacccggtcggtcttgcccgcgccccggttctgcgccatcagggtggtcatggcgtggccgatgttctgctgcggggtgtaggcgaagtcatcgatgcgggaggcagcggtaaaagccgccatggcgttgacgcccatggtgttcacgatggcctgcaccgcaattttgcccagctgcaccgtggcctgctgcatcgcgctggcccagccgtagctcacggtcttgcgcagcagcttgccgtcatataccagccaccgcctgcccagctgcaggactggtaccttatagcggatgtacaccacgcacagcaggcagcaggcggcctcgctgagcacggtggaaagagcgcagccctcgctgccccagcccagcgcctccacaaaaaacaggtcgccgccaatgttcagcaccgcactgatcatcaaaaaatacagtgcgctcttgctgtcgcccagcgcacgcatggtggcggcaagaaaattatagaagaaggtgaagatcagccccgcaaacacgatacgcaggtagttcaccgcaatgggcagaatggccgcaggcacctgcagcagccgcagcagcgggtctgccagcagcacgcacagggcagagaaggtcaaagagaacaccgtgcccgcaatggcagtggtggatacttgacgctccaccagctcggtatcccccgcgccaaaggcggtgctgaccagaatgcccgcgcccagacacatcccgttgatgaacaggatggcaagggtcatcagggggttcgaggtgcccacggcagccagtgcatcctcgcccacaaacttgcccacgatgatactgtcggcggcgttgtaggtaagctggaacaggttgcccagcaccagcggaatggtgaatttaatcagcagcggcgtaatggcgccgctggtcatgtccttggtcatgaaaaacgtcctctttcctattgatagaagcagccgcttacacgatgctggcgcgtccgctgaaaatggccagcgccgcgcggctgttgcagttggccagcagctgggcggcggcgtgcagggcagcaccggcgctgaccgaagcggggatcgcatcggtgcgcagcacctgctgggcggcacgctgggcgtcccggctggccacggcggaaacgttatccaccacatagctgttgtagttttccggcacgatgccgtagccgatatccgggatgccgtgggggccggtaagcccgccgcccagcacctgattttcatacggctccaccgccacgatgcgcacatcgttcgtccatgccttgatggtctcgcctacgccggtcaccgtgccggcgctgcccacgccaatggtgatggcgtccacaaggctcttgttctgccgggcaatgctttgcacgatggcggggccggtgacccggcggtgatattccgggttatcgtcgttggcaagccagttcatatagtaccagccgttcgcggcggcggtctgcgccgccagtgcccgcgccccggccagaccgctgcgggcggggctgtgccggatctgtgcacccagccgcagcaggtactcctgccgcagggcaggggcgtcctccggcatcaccagcacgatggggtgcccggcggtcaggctggccagcgtcagggcggtggcaaaggggccggaggctgcctcaatgatgggctgccccggggcaagctgctttttttcaatggcaagggccagcatcccctcggcaaggccgtcccgggcggtgccggtggggccgttaaaatccagatacgcgtacagatgccccttcagcccacaggcggcggcgtagccccgcagctccacaatggggcaggcggtggtaagggtctggtaaaaattagagtagatcggcacaagggcactcctttctcttgggatacaacactattatcctaacgcaaagcccccggctgcgtcaagatgccttttggcaaaaacagcgaattttgggcagatatttcagaaaaaactccaaaatccccttgacaaggggcaggggttctggtatactccatccgtaaagcaaaaaaactttacaacgcagcaagcacagacagcagagcaccgggggtcaacagcaatggcaaaagatctggaaatggggtatctgctggatttttatggcgaggtgcttacccagaagcagcgcgagatgctgcgccagtattacaacgatgatctttcgctgagcgagatcggcgaaaacttcggcatcacccggcagggcgcacgggacgccatcaagcacggcgagaccaccctgaaggaactggaagaaaaggtaggctttgcagcccgctaccggcgggtgcagcagaagctggagcagctggaacagctggtcattgacacccggttcgagtgcaccggcccccgcgccaatatcaccaccacggaatatgtggaaacgctgacaaaaatgctggagatcatccgctcgatggatgaagcaaacgaaagctgatcgaattttgaaaggagcaccgcacaatggcatttgaatccctgaccgaccgccttgccggtgtattcaaaaagctgcgcggtcacggcaagctgaccgaggcagatatcaaagccgccatgcgcgaggtgcggatggctttgctggaagccgatgtcaactacaaggttgccaaggacttctgcgcaaaggtgtccgagcgcgccatgggtcaggaggtcatggaaagcctgacccccgcccagcaggtggtcaagatcgtcaatgaggagctggtagccctcatgggcggcagcgaagccgcccgcctgaacatcaagaacaagggtcagacggtcatcatgctctgcggcttgcagggcaacggtaaaaccacccacgcggcaaaacttgccaagttctatatcaagcagggacgccgccccatgctggtagcctgcgatatctaccgacctgcggctatcgaccagctgcaggtggtgggcaagcaggccggtgcaccggtgtttaccctgcccggtgcaaagccgccggaaatcgcccgcaaggcgctggcgcacgctaaggactacggcaacgacatcgtcattctggataccgcaggccgcttgcagatcgacgaagtgctgatgcaggagttggtggacatcaaggccgccgttcccgtggatgagacgttgctggtggtggacgccatggccggtcaggatgccgtcaacgtggccaagaccttcaacgagacggtgggcgtggatggcatcatcctcaccaagaccgacggcgatacccgcggcggtgcagcgctttccgtgctggccgttaccggcaagcccatcaagtttcagggcaccggcgaaaagctggatgatctggatgtgttccacccggaccgtatggcaagccgcatccttggcatgggcgatgtgctcagcctgatcgagcgcgcacaggatgccgccgacgaaaaggctgctgaagagaccgccaagcgtctgatggaaaacaagttcgatatgaacgatatgctggagcagttcgcccagatccgcaagatgggcggcgcaggcgcgatgctcagtatgctgcccggcgcttccggtatcgatgccagccagatcgacgaaaaagcctttgaccgcatcgaggccatgatctattccatgaccaaagaggagcgggaaaagccctccatcatcaaccccaagcgcaagcgccgcattgccgcaggcagcggtacccgcgtggaggacgtgaacaagctgctcaagcagtacgagatgatgcagaagatgatgaagcagttcaagaagagccccaagggctttgcccgccgtctgggcggcatgatgggcaaccccaacgccttccgcggactgaaataacaacggtatacaaccccggcggggtttgtaacatatatcaaaaacaacaatttttggaggatatctattatggcagttaagattcgtctgcgccgcgttggcgccaagaaggctcccttctatcgtgttgtcgttgctgacagccgcttccctcgcgatggccgcttcatcgaggagatcggcacttacgatcccaacaaggagccctctgaggtgaagatcgatgccgagaaggcaaagcagtggatcgctaacggcgctcagcccactgataccgttcgtgtcctgctgaagaagtccaacgttctgtaagtagggagggctgactcatgcaggagctgttgctggcagttgcccgcggtctcgtggaggacaaggacgccgtcaaggttacggtggacgagccccgcgaggacggtaccatcgtctaccacctgagcgtggcagagggagatatgggccgtgtcatcggcaaacagggccggatcgcaaaagccattcgtgtggtgatgcgcgcggctgctgtgcgggtcgatgaaaaggtccttgttgagatcgactgagcaccctactggccctttgcccttgcggcaaggggcctttttggttatagaaaaccctctcaggcgcttcgcgccagctcccccgaaagggggagcttggagcagactgtacacaggagcattctgaacaaacaagcaatacaccacctcttcgtcaaaaagctcccccctcgggggagctggcaatgccgcaggcattgactgagagggttcttacaggagaaaacgatgcagcaatatctggaagccggaaaagttgttaccacccacggtgtgcgcggggaaatgaagctggagctttggtgcgacggggtggattttttgaaaaaagcgggccgcctgtacccttcggcgcagggcggcaaggcgtataagatcctttccatccgtccgcaggggcagatggcgctgctccagctggagggggtcagcgatatggacgccgcccgggcgctgcgcgggcaggtgttctactttgatcgcaacgatgccaccctgcccgcaggccggtggtatgtggcggacctcatcgggtgcgaagtgcgggatgccaacaccggcaaggtgtacggcgtggtgaccagcgtagaccacccgggtgcgcaggatatctacaccgtcaaagcacccggcggcaaggagtatatgttccccggggtggatgcctttttgaaagagcgtaacccgccggaggggtatatccttgttacccccatccccggtctgctggatgacgattttgacagcgagcgggaggaggagtaagccatgggaatgcgtgtggacatcgtgactctgttcccggagatgtgccagcaggtgctggatgccagcatcatcggccgggcggcaaagcggggctatattgagacccactgccaccagatccgggattataccctgaacaagcagaagcagaccgacgattacccctacggcggcggctgcggcatggtgctgtacgcccagcccatcgcggactgcctgcgcgcagtgcagcgcgaggtggcccagcagggacgccctgccccgcatatcgtgttcctgacggcgggcgggcagcgctacaccgaggagcacgcaaagcgcttggctgaatatgacaacctgacgctggtctgcggccactacgagggcattgacgagcgcgtcatcgaggcttttgcggatgaggaaatctccattggtgattatatcctgaccggcggcgagcttgccagccttgtggtggcagacagcgtgctgcgcctgaagcccggcgtattggccgagcagaagggctacgaggaggaaagctactgggacggtctgctggaatacccccagtacacccgccctgaggtgtgggagggccgtgctgtgcccgaggtgctgctgggcggcgaccatgcaaaaattgacgcgtggcgcggcgagcagagccgcacccgcacccgtctgcgccgcccggagctgtacgagcagtggtgtacgagccaccccattgccgaagtgcccaagtggaagcggggcgagaatgtccggctggtaaagactgccgagcagtttgccgccgccgcaaagctgtttgccgagggacggcaggctgtctgcgccgacaactggacgccggaatactgccgcaccttgaccgagccgcagtttttgctgcaattgcagcaggaaaaggcggcgggctgggtatgctacctgcacaccaccaaagatgtgccggacggcatggtgtgtgtcagccacaaggcggggcatatcgagcacctgtttgtcacggaaaaagcccggggcaacggcatcggcgcaaagctgctggattttgcccgcaaaaagctgccggagcacgcacacccggtgctgagtgtgctgaacaccaacacccgcgccattgcgctgtatacccgcatgggctggcagctggacggcagcaccagtctggaatttgacccgcagcgctaccccaccgtgacgcgtaaatgcgcactggtgcagatgcgctacgcaggccctgcgcaggagtgagtcggcaccggaaatatcggtaaaaatacacaaaattcagggcaaaactccccggcggtctaaaagttgttgaaaacttttgtattacccctctaaccttcggggtataattttattgtctttgtacaaaacctgaaaaatgctccctgtttcattgggaaaagcgccaaaaatgcaaaaggggactgtacaaccgtttcgacttgcgctaaaatgagtgtaacacaacaggcacactatgcttttgtacaccaaaacgatattagataggagcgctttactatgtacgtaaaagaagttaccgttgaaaatcaggttggtctgcacgctcgtccggctaccttctttatccagaaggcaaacgagttcaagtcttccatctgggtcgaaaaggaagaacgccgcgtgaacgcaaagagcctgctgggcgttctgtctctgggtatcgttggcggcaccaccatccgcatcatcgctgacggcgctgatgagcaggctgccgtggacggcctgatcaagctggtggagtccggctttgcagagtaagtctgtatcacaagcaacagaaagcggcgggggctccctgccgcttttttgataagctttttaccgggagcaaagggctttccattgccggaagccccgtcccacagacacggaggaaggtgctgcatgaccaaggccgagctctatcaaaaagcctgtatgctgccgctgctgcccggggtgtatatcatccgggacaaaagcgacaccatcatttatatcggcaaggccaagcgcctgcgcatccgggtaagccagtatttccgcgagggcgtgccccacgacaacaaggtcagccagatgatcgcccacgcctacgcctttgacgtcatcgtctgtcagagcgagttcgaggcactggtactggaagccagccagatcaaggcgcacacccccaagtacaacatcctgctcaaggatgacaagggctatagctatatccgcgtcacccgggaggactggccgcgcctttccttcaccctgcaaaaggaggaggacggggcggagtatatcggcccttacacctccagctttgcggcgcggcagatggcagaaacggccatggatgcctttttgctgccgcgctgctccaagcgcttcccgcaggaaatcggcaaaggacgcccctgcctgaacgcccatattggcaagtgcatggcagtgtgcagcggcaagatcagctgcgagacctacaatcaggcggtcaaaaacgcggtgcacctcatccgctacggcaaaaaggatatcctgaaaaccctcaacgagcggatgcaggaggcctccgaccggctggaatttgagaccgccgctcttctgcgggatcagatcaacgccatcaccaagctgacggcagggcagaaggtggtggtagacccggacgtggagatggacgtggtggcgcttgccggtacgccggacagcgtgtgcgcggcggtgctgcgcttccgggagggacggctgactgacaagcgggagtttttgttccacgatacctcggatatcgacgcggtgcgggaggaatttctgccccggtactatctggacgatgaacaaattcccaagatcatcgcggtggacgcactgccgccggacgtggacgccttgcagcaggcgctgaaccagaaacggggcagcgaggtgcagctgtatgtgccccagcggggcgataaagcgcatctggtggaaatggcgcacaccaacgcggtggagcgtctggcgcgggagagcggccgctacgcccgggaagaaaagctgctggacgagctggcgcaggtgctggggctttcaaagtcgccccgcgccatcgagagctacgatatctccaactggggcgatggcagcagcgtctgcggcatggtcaccttcaaggatggcaagcccttcaaggcgggctaccgcaagttcaaaatgaaaaccgtggcgggcacggacgactatgcctcgctggcagagaccgtttcccgccgggcggcagagtacgaaaaatacgctgcacaggctgaaagcggtcagtccagcggcaactggttcgggcagaagccggaccttttgctgatggacggcggcaggggacaggtgagcgccgcaaaggaggcgcttgccggtacagcgctggcagatgtgccgctgtacggcatggtaaaggatgaccaccaccgcacccgcgccatcgtggacagcgacgggcgggaaattgccatcaacatgaaccgcggtacctttaccttcattactgccattcaggacgagacccaccgctttgccaacgcctaccgcaagcagcagatgaagcaaaaaagctactcctccaccctgaccgaggtgccgggcgtaggccctaaaacagccaaagccctgctgacgcagttcaagagcgtgggcgcggtgaaggacgccacccccgaccagctggaaaacacacctggtgtgggcaggcagctggcacagaccatctacgattattttcacagggaagcataaaaacacccccggcatccgttttcgtttcgttcggatgccgggggtattctgcgtttaggggtcaattcgtataggagatggagagatcgccggtggtggtactgagggagattttacgagagggattggccttgccatcctggatggaagtgcccataagcccattggtgacgagggtatagtccgaggcactgccctccagggtcaaggcggccttgccaagggtgaccgagatgttgacatcctgagcaccggacagcataccgatggtgcagtcccccatggcaagttcggcatcgaattccggtgcggacagatggtcaatgtgacagccgcccatggcaagatcaaaatctgcatccttcacagttaggctgtcggcagagacgctccccatggcaagttccaaatccagttcatccagagagagggtgccaaggtcaacgtcccccatagcaagatcaatgtccacctcatgcaggatattttccggaacggtaatggtgagcaaagcgctgtcggaatcagggagagcgttgtatttgggaatatggtaggaaaactctgtggtcccagctttttcgctggaatgggtgaggtaccgggtcctaaagccatcaaactgcagcgtgatgtcagaagcatttgggtcaacaacaaatagaacggtaccataatccaacttcagggatagcttatcgtggaccatctcagcagagagggagaatgtcagaccgtctgaggcagaaacggaatccacggcctgcggttgagtgctctcagctgacacttccgcagaggaagcaggaatttccgaggcagaagaaacgggctccaccggctgtaccggggtggccttggagtgctggaagaaaaagcaggccagcaccagcaccgccagcccgccgcccagcaccatgcgccagcgggaatgcggcttgcgtgcaggggatgccggggcggcagaactgcctgccggggtctgctcatccagaattttgcgagcgacctcctcggggctgcccagctccgcaatggcgcgggcttcgttttccggcccggcggcatccagataatcttcgtaatagctcaaagcgtccttgcgctcggcctccggcaggggagccagaagctgttccagcgcagcaagaaatgcagtacgggtcatagatcattccacctctctgaaaaatgtgtcaatggaagaacggtagcggctccactcctgcgcgtaggcggcaagctgcgcccgcccggcggaggtgatctgataatagcggcggttgcggccattgaagggcgcatcgtagaccgtgagcagctggtctttctgcagccggcgcagcaccgggtacagggtggattcgcttagctccagcgtgtgggtgacctgttgggtgatcttgtagccgtaggtaccttccggctcctgcgccaccacggacagcacaatggcatccagcagcgcggcactgatgggaaaactcatgcaggaacagcctcctttcggtagggtgtgtttctataatattatatatcatataatattgcataagtcaatagagaatttaccctctcagtctcgctgcgctcgccagctcccccgaaggggggagctttaccgcacggactggcagataacaaaaaagctccccctttcgggggagctggatgcgaacgaagtgagcagactgagagggccgagcttctcagttttcagaagagatatcctgtccgaaatacttctcgctcagggtctttaaggtgccgtcggcgcgcagctcctcaatggcggtgttcagcgcgtccagataggcggtgtcctcgctcttgagcaccgggatggccacatgagaggcctcggcagtctgcgccaccagcttgaagtctgcgtccgggtggacgttcaggtagtcgtagaaggaaacatctgcgttcagggtggcatcaatgcggccggcggtcagcagctggatggtctcctccagcgtgtcgatgccctgcacggtagcgccgtagctttcggccagctccatgtaggtggaagccagactgttggcggtggtcttgcccttcaggtcctcaaagctgtggatatcctcgttatccttgcgcaccgccagcgcagtgtggatgtagccgtagggggtggtaaaagcgtaggtcttggcgcgctcctcggttacttccacgccgttgcacaccatgtcgtagcggcctgcgtccagaccggcaaacaggctgtcccagtcgctctccacatactccggctccacgcccagcttttcggcaatggcgcgggagacctccacatcgtagcccaccagcgtgtcggaagcatcgtggtaactccacggctgccatgcgccctccagcgccaccaccagcttgccgctcttctggatgctgtccagcttgttcagcggtgcggagctggcagtactggcggcggtgtccttggaagagcagccggtcagactgagcacaccggctgcggccataacacccatcagagaaataaaggttctgcgtttcataagtaaaaattcctttctgtcgtgaaaaaatgcaaaaagagaagtggttttattccgtatgggcgatcctgcgcaggaaggcccgggtgcgctcctccttgggggatgcaaagaactgctgagagggtgcctgctccaccaccacgccgttctccatgaacacggtcttggaggaaacgttgcgggcaaagcccatctcgtgggtgaccaccagcatcgtcataccctcctcggccagctgccgcatcacgctgagcacctcgccggtcagttccgggtcaagggcgctggtgggctcgtcaaagtaaataatttccgggtcggcggcaagggcacgggcaatggccacccgctgctgctgcccgccggaaagctggcgggggtagtagtcggcgcggtcggcaaggcctaccttggcaagcatcttcatgccgatctcatccgcctgctctttgggcagcttacgcgctacgatcagcccttcggtcacattctgcagggcggtcttgttgcggaacaggttgtagttctggaacacaaaggccgtctttttgcgcagccgggcaatgtcggcgcggctggcatgggcaaggtcaaagctttcgccgtcaaacaccagctgcccggcatcggcagtctccagaaaattcaggcaccgcagcagggtggtcttgccggagccggacggccccagaatggccaccacatcgcccttttccacggtcaggtctacgccgcgcagcacgggcagatcactgatgaccttccgtgcaccggggcggtggaaaaggccgggctttgcgtaggtgcgaaaggttttttgcacattgcggatctctaacatagccataggtgcgcacctccctttttactggaagccgcgggcgttgagctgacgttccagcagcgcctgcagcttggtgatgacggtacagaacagcagatacaccacagccacctcacagtagatgggcagaaagatgtaggtgcgggcggctacccgctgcccggccatgaacagctctgccaccgtgatattggacgccagcgaggtgtccttgatcataccgataagggagttggacagcgcaggcacagcggtgcgcagtgcctgcggcagcacgatgcggcgcatgatctgccaccagctcatgcccacacagtacccggcctccagctgcccctgcggtacgctttccagcgcaccgcgcatggtctcggcgcagtaggcaccctcgttgaaggcaaaggcaatgactgccgccggaaaggcgttcagcatgatgcccacgctgggcaggccgtaaaagatgatgaacagctgtaccagcagcggcgtgccccggatgacccagatatagaaccgggcgatctgccgcagcaccggcacattggcgtactgcaccagcgccaccgccactgcgatgatcatggcaaaaaagaaggagagaagggtcagcggaatggtcatggtcaggcctgccgtcaggatgcggggcagcgcctccatcagcacgctgaccgtgcggttggataaaagtgcttcaaacatcgttttttcctcaaaataaaatgcgcagaccggcaaggcttttgccggctaaagcagtatataccttaaagtagggtcaaagtcaagagactgaatcacaaatccctacaaaacctaccagaatactataatagcatgaaatgccccgcagcgcaaacagtttgcacaaaacgtgtgatgtgcccgaaaaattgcataaacttgttaaatatttgtgcaatgcggcagatgcttgacgctgtgggcgctttcgtgtacaatgaacataacagtgcgcgggtgcggggcaacggcccggcgcggcgcaaatccaccggcaggggcttgccccttgcccggtgcagacacggaggatacgaacgtgaaaaagtttagtattggtgttctgggtgcaggcacctggggcatggctctggcacggatgctgaccgtcagcggcaacgatgtgcaggtgtggtcggccattgaggccgaggtggacaacctttccaccacccgggtgcaccccaatctgccgggaatggtcatcccgcaggagctgcgttttaccaaaagcatagaggaagtgtgcaccggcaaggacgtgctgctgtttgcggtgccgtcggtgttcgtgcgcgccacggcggccaaggcgcggccctatatccgctccggccagatcatcgtggatgtggcaaagggcattgagcccgataccttatataccatgaccgagatccttgccgacgagctgagccacgagaacggcccccgggcggtgcgtctggtggcgctcagcggccccacccacgccgaggaggtggcgctggatctgcccaccaccatcgtttccgccagcccggatctggaggctgccgaggtagtgcaggaggtgttcagcaacacctgtatgcgcgtgtacaccaacactgatatcaagggcgtggaactgagcggtgctatgaagaacgtcatcgcgctgggtgtcggcatctccaccggccttggctacggcgataacgcccgcgccgctctgatcacccgcggcattgccgagatcgcccggctgggcgtggccatgggctgcaatgtccagacctttgcgggtctggccggtatcggcgatctgatcgtcaccgccaccagtatgcacagtcgcaacaaccgcgccggtatcctgatcggcaagggcgaaagcccggagcaggctgtgaaggaggtcggcatggtggtggagggcatcaacgccctgcccgccgccatggagctggccgagaagtaccatgtggaaatgcccattgcccagacggtgaacgccatcgtcaaggagggcatgagcgccagcgatgcgctgcgcaacctgatgtcccgcgaccgcaagagcgagatgccgcagggctatgagagcgtgtgaacctgaaataatcgaaaagaggcttccggaatgtctgcgggcattccggaagcctcttttatttggcgggaggtacagcaaaattattaaaactttttacagaaaacagacacaaaagggtagaaggtcggcaaactttctgctatactggaaacgatagaatttttggtcagtgcagccggaacagagcggcgggcgctggcactgcaagaaggaggaatgagaaatgccctctacctacgcacaccgccgctttggcgcaaatgtgctggaccatctgcccgcgccgctgcgggaaaagctggaggcgcaccgggagctgtacgatatcggcctgcacgggccggatgtgctgttctattaccatgcggaaaagtccaccccggtcgccgcgctgggcaacgccatgcacgacgagccgggcagaacgttctttgaccgggcacggcgggtggtgcacgaggaagccgaccgcgaggctgcgctggcctacgcgctgggctttgtgtgccattttgcgctggacagcacctgccacccctttgtggaacagtttacccgagagagcggtgtgactcactgtgagatcgagaccgagttcgacaatatgctgctgcgccgggacggctatgacccgctgaccttctttaccgccagccatatccaccccagcgcagagaacgcccgggttattgcgccattctacaaggatatttcggagcagaccgcactggaatccctgaaggggatgatcctggtgcataaggtgctgcaggcttcgaacccggtcaagcgctgggtggtgctgaccggcatgaaggtgctgggcaagtacgatgggatgcacggccttgtggcaaacccgcagccgaacccgcagtgcaccgagagcaaccgcaagctggatgcgctgtacgccagggcgctgccgctggcagagcggctgatcttagagtatgtggcaaagctggacacggacgagccgctggacgccgcctacgaccacacctttggggaattttaaaaaacgcgccgtccggcggtgcaaggggaaaagggaaatacgatgaaaactgaaaaattcaaggtgacaccgctggagcgggcgtggatcttatacgatgtgggcaactcggcctttgtgctgatgatcgctacgctggtgcccatcttcttcaatgcactggccgaggccggtggcgtgagcaaggtggactatctggcctactggggctatgcaagttccatcgttacggtggtcaccgccattctgggacccattctgggcacgctggccgacaccaagggctttaaaaagcccatcttcatgctctgcctttttgtgggcgtcatcggctgctgcgctatgggtctggcgggcacttggctggcctttctggtcatttttatcattgccaagatcggctactccggcagtctggtgttctacgactccatgctgggcgatgtgaccaccccggagcggatggacatggtgtcctcccgcgggtacgcatggggctatatcggcagctgcgtgccctttgtggtctgtctggcgctggtgctgggcagcagtgcggtggggcttagtcagatgactgcgctgtccatcgcgctgatcattaccgccgtgtggtggctggtggtcaccctgccgctgctgaaaaaataccgccagatcaactatgtggaggtggagcagcacgccatccgccagagttttgtgcgcattgggcagaccttgaagcatctgccgcaggacaagcaggtgttctggttcctgctggcgttcttctgctacattgacggcgtgtataccatcattgatatggccaccgcctacggcacggcactggggctggacaccaccggtctgctgctggcgctgctggtcacccagatcgtggccttcccttcggcgctgatctttggccgcctgagccagaaatatgaatccaagaccctgatcccggtgtgcatcgcggcctataccggcattgccgtctttgccttcttcctgaagagtcagtggcagttctgggtgctggccgtggtggtgggtatgttccagggcggcgtgcaggcactgagccgcagccactttgccaaaatcatcccgcaggaaaaatctggcgaatactttggcctgttcgatatctgcggcaagggtgcctccttccttggcactatgatcgtcagcgtgggcagccagctgaccggcagcgccaacgtgggtgtgggctccattgccattttgttcgtcatcggctttgtgctgttcggcatttccacccggacggaacagacaaagcaggtctgaccattttatgaaaaaacgaagcccggagcgtccgcagacgttccgggcttcgtttttgttcagaggggtcgctgtacaaaatgctgtcggacgggggcggcacaggcaaaattatcatgcaaaaaatacatccttgaaaaaagtggaattaacctattgacaaactaggtagaacgggatataatgcaaacatccaatccaccagtcttgtagggaaatgaaacagaggttctccggcgggtggtacatagagggatggaaaagttttaccggaaggagggcacaaagatgaagctgatctggaaagaactgctgcacgcgaattatcgctgtgggcgaatgcataccaaccgggcaccggcatcggatgtgtactgtatgttgccctcggctgtgcgaatgtgcacccgaatgtgacagcagcagctccggtggaccacactgcccggtgcgtctttgaaaacgcatcgggattttttgtacacaataataatacttttggtacataaagagaggaaaataacaatgtctgaatataaatttgagaccctgcagcttcatgtcggtcaggagcaggccgaccccaccaccgatgcccgtgcggtgcccatctaccagactacgtcttatgtgttccgcaacagccagcacgccgccgaccgtttcggtctggccgatgcaggcaacatctacggccgtctgaccaactccacgcaggatgtgttcgaaaagcgcatcgcagcgctggagggcggcgtggcagcactggctaccgcttccggtgcagccgccatcacctacaccattcaggcactggcacaggccggtgaccacatcgtggcacaaaacaccatctacggcggcagctacaacctgctggcgcacaccctgacccagttcggcgtcaacaccacctttgtggatgcccacgaccttgcacaggtggaggccgctatccagcccaacaccaaggctgtgtatctggaaacgctgggcaaccccaacagtgatatcccggatatcgacgccattgccgccatcgcccacaagcacggcctgccgctggtcattgataacaccttcggcaccccgtacctcatccgtcccatcgagcacggcgcagacatcgtggtgcactctgctaccaagttcatcggcggccacggcaccacgctgggcggcatcatcgtggacagcggcaacttcgactggaaggccagcggccgttaccccaacattgccgccccgaaccccagctaccatggcgtctcctttgcggatgccgcaggccctgccgcttttgtcacctacatccgcgctatcctgctgcgtgataccggcgctaccatctcccccttcaacgccttcctgctgctgcagggcaccgaaacgctgagcctgcgcatcgagcgtcatgtggagaacaccaaaaaggtggtggagttccttgccaaccacccgcaggtggaaaaggtgaaccatccctcgctgccggatcacccggatcacgctttgtaccagaagtatttccccaacggcggcgcatctatctttacctttaacatcaagggcggccgcgaggaggcctttaccttcatcgacaacctgaagatcttctctctgctggccaacgtagcggacgtgaagagccttgtcatccacccggcctccaccacccacagccagctgaccgatgccgaactggccgagcagcagatttaccagaacaccatccgcctgtccatcggcaccgagcacattgatgatatccttgccgatctggaagccggtttcgcagccgtccgcggcaagtaagcagcgattctctttcccgcaaagggaatgtgatcttccttttattcctgtccaagtctccataagtgtgcgacaagacccccggctacccgccgggggtcttgtcatcattaaaaaagtggttcagaaacgcctgtgggcgtttctgaaccacaaattatactgccgtttttccgattagcggccgatcagcaggtcgcggcggcagcgcagacccacagagagggtagcattgctgcccagatgccgcagggtgacgcgggtgccggacttctgtccctcgcacagcagcgagaggttcagggtggtggtgttcttctcggtcaccagcaccagcgttttcacgccgttggcctgcaaagtctgcatatcctcgatggtggtgcggaaggtagctacctcggcggggacgtccagcgtcagcacgccgtccttctggcgggcggtgtacagcagctgcttgcccagcagacccttcacggtgtagcgtgcctcggtcttggcggtgtcggccaactcatcgccggagatcagcatgatgttgccctgaatggggttgccctccggggcaccgtaaccgccgtagctggggtctttttcgcccacggcaacgtcaccgctgtgcagtgcgatgtcgccctgcaccatctgctcctgcgggggcagatagccctccacgcaggtggaatccacctcggcggcaaaggcacccacgctcagcatggcagcggcgcacaccgccacagcggcacagctcagggtacggacaaactttttgttcagcatcttcataggaaatacctcctgaaaacggcagccgcagggactgccttatttttttgcatcataatttttttaaaccatggttcagctgcggcgcattcacaatggaaaaccgccgtatctgctttgtaaacggatacggcggccggattattgcaaaagattcaaaaatttttattttcagggattttctggtttgttttcggcatcatcgcggttaaggatatccatgaactcctcgccggtgatggtctctttctggtacaggtactgtgccagctcgtccagctttgcgcggttctcggtcaggatgcgaatggccttttcgtgctgggtcttgaccagctctaccaccttctgatcgatctcgcgctgggtctgggcactgcaggtcagcgaggtatcaccgcccagatactggttgtttacggtttccagtgccaccatgtcaaattcatcgctcattccgtagcgggtcagcatggcgcgggcaagcttggtggcctgctcgatatcattggatgcgccggtggtgatggaattgaaggctacctcctcggcggcgcggccgccggtcagggtggcgatcttgttttccagctcggccttgttcatcaggtagtggttgccctcgtccacctgcatggtgtagcccagtgcgccggaggtgcgggggataatagtgatcttctgcaccggggcagagttggactgcttagctgccacaagggcatggccgatctcgtggtaggctacgatgcacttttcgtggtcggtcaggatggagttcttcttctggtagccggcaatgaccacctcgatgctctcctcaaggtcggcctgcgtcacgctcttgcgtcctgcccgcacggcacgcagagcagcttcgttcacaatgttggccagctctgcgccggaagcaccggaggccatgcgtgccacggtgttgaagtccacacccggggcaatcttcacctttttggcgtgtaccttcaagatctcctcgcggcccttcaggtcgggcagctccacgggcacacggcggtcgaaccggccgggacgggtcagggcagggtcgagggaatccgggcggttggtagccgccagaataatgacaccggtgttgccctcaaagccgtccatctcggtaagcagctggttcagggtctgctcgcgctcgtcgttgccgccaaactggccgctgttgcgcttctggccaatggcgtcgatctcatcaatgaacacgatgcagggtgctttttctttggcctgcttgaacaggtcacgcaccttggaggcacccatgcccacgaacatctccacgaactccgagccggagatggagaagaagggcacgttggattcacctgccacggccttggccaacatggttttgccggtgcccggagggcctaccagcagaatgcccttgggcatggaagcaccgatctcctcgtactgcttgggatcgtgcagataattgacgatctcctgcaggttctccttggcttcgtcctcaccggccacatccgcaaagcggatgccgtgggtggactgcacatacacctttgcgttggacttgcccgcgccgccaaacatcatggagcccgggccgccgcctgccttttccatcagctttttgttcatctggttgccgatgaagctgaacagcaggatgggcagcacgaaccacagcaaaaagctgagcaccggcgaaccctgctccacgatctcgctggagaactgtgcacctgcgtcgtacaggcgctcggtcagactggggtcgttcatcaggccggtcttgtagatctgcttgttgtccttatccgtaaaaatgatctggttggactggatatccaccttgccgatgttttcctgctcggtcatgctcataaaggtgccgtagtctacctcctgcacctgacgctcggccagccacggcatgaccacaaggttgatgaccagcagcaccagcaacacgatggcatagtagatagccagcggctttttggatggcttgacttctttcatgggatgttcctccttctatataaagtgggcttccacccgtttgctgcgtccagtataccacaccttaccgcctagcaacagcgcagcgagggcaactttgcaaaaacttagcagtttcttaacaaagagggctaaagccgctcagttaccatattataggtgcgcaaagggcttgccggatgagggggcaggggagcaacgacctcaattttgcatgatttaccccatggtattgtgaaatgctttcatctttatcctgaacgaaacttcttgacactttctggcagtcgtgctaaaattatctcactttcaacaaagtgcaaatgcgttgacagggataaaacgatctttcttctgcgtgcagagagccgccgggtggtgcaaggcgggtgcagagaacttcggatactggcccccgagcggcagaactgaacggacaagtaggttctgacggatgcccaccgttacaagggcagcgattcgctgttttggccgatcgtgcaaagtggctgtacctgaccgtgcagcaaggagagtggtaccacgggtgccctgtaaaagcaatttacaggctctcgtctctcaaggttttcgccttgaaagacgggagccttttttcgtacaacggttgcagtagggcaaaaggcttcccccggtcgggggaagctgtcaccgcaggtgactgatgagggcgcaggcaagcagctgctgccgggaaatcacccctcatccggcgcgctacgcgccaccttcccccaaggggtgaaggctttatgctatttcaggaggacaacaggatgatggacgctaccaagtacgcaccggggtactacccggtacccgccggttatgacagctgggtaaaaaaagaccatattgaaaaggctcccgcatggtgcagcgtggatctgcgggacggcaatcaggcactgatcgtgcccatgagccttgcggaaaagctggagtttttccagatgctggtgaagatcggcttcaaggagatcgaggtgggcttccccgccgccagtgagaccgagtacgagttcctgcgcaccctgatcgaaaaggacatgatccccgccgatgtcaccgtgcaggtgctgacccagtgccgcgaccacatcatccgccgcaccttcgaggcagtcaagggcgcaccccgggcggtgatccacttctacaactccacctccgtggcgcagcgggagcaggtgttccacaagtccaaggaagagatcaagcagatcgccgtggacggtgcaaagctggtcaagcagctcagcgaggagtacgagggcaacttcctgttcgagtacagccccgaaagctttaccggcaccgaggtggactacgccgtagaggtgtgcaacgccgtgctggatatcatgcagcccaccccggagcgccccatgatcatcaacctgccggtgaccgtggagatgagtatgccccatgtgtacgccaaccagatcgagtattgcgacaagcacctgaaataccgcgacagcgtgatcatctccacccacccccacaacgaccgcggcaccggcgtggcctgcgcagagctggcagtgctggcgggcgcacagcgcgtggagtgctgcctgtttggcaacggcgagcgcaccggcaatgtggacgctgtgacgctggccatgaatatgtacagccacggcgtagaccccaagctggacttctcggatatgcccgctatctgcgccacctacgagcgggtgacccggatgcacatctacgagcgtaccccctacgccgggcagctggtgtttgccgccttctccggcagccatcaggacgccattgccaagggcatggcgtaccgcaagcagaccggcgaacaccgctggacctgcccctacatcccggtggacccccacgacatcggccgcacctacgacgccgatgtcatccgcatcaacagccagagcggcaagggcggcatcggttttgtgctggaacagaactatggctacaatctgccccccaagatgcgggaggcgctgggctacaaggtcaagagcgtgtccgaccacagccacaaggagctgagcgccgccgaggtgctgcacatcttcgaggatacctacctcaaccgcgcaaagccgctgaatgtggtggaagcccactttgcacaggtaaacggcattaccgccacagtcacgctggagctgaacgggcagcgcaaggtggtcacctcggtgggcaacggccgtctggatgccgtagccaacgccatccagagcgccaccggtatggacttccatctggaaaactactctgagcacagtctggacgagggctctacctcccgcgcagcctcctatgtaggccttgtctggggcgacaacacagtcacatggggtgccggtaccgacaccgacattatcgtggccggtatccgtgccctcgtcagtgcgatcaataatcgataaaaaggagaaaactaccatgggaatgaccctgacgcagaagatccttgccgcacacgccggcctgccggaggtcaaggcaggccagctcatcaacgcaaagttggacatcgtgctgggcaacgatatcaccaccccggtggccatcaacgagtttgaacgcgccggtttcgaccgcgtgtttgataaagagcatatcgctatcgtgctggaccactttgtacccaataaggatatcaagagtgctacccagtccaagcagtgccgggagttcgccaataaatacgatatcctcaacttctacgatgtcggccagatgggcattgagcacgcgctgctgccggaaaaaggcatcgtcaccgccggtgactgcgtgatcggcgcggatagccacacctgtacctacggtgcgctgggtgccttctccaccggtgtaggctctaccgatatggccgctggcatggctaccggcatggcatggttcaaggtgccctctgccatcaagttcgtgcttaccggcaagtttaacccccgggtgtccggcaaggatctgattttgcatatcatcggcatgatcggtgtggacggcgcactgtataagtctatggagttcaccggcccgggcgtggcaggccttaccatggacgaccgcctgtgcatctgcaatatggcgattgaggccggtgccaagaacggcatcttcccggtggacgaggtgaccaaggcttatcttgcaggccgcagccagcgcccgccggtgttctacgaagctgaccccgatgccgtgtacgaaaagaccatcgagatcgacctcagcgcactggagcccaccgtcagctacccccacctgcccgagaacacccatgttgccagcgagggcaaggacatcaagatcgatcaggtggtcatcggcagctgcaccaacggccgcttagaggacatggaagccgcctacaacatcctcaagggcaagcacatcgccaagggcgtgcgcggcatcatcatccccgccaccatggctgtttataaggagtgcatcctgcggggctggaccaccgcatttattgacgcaggctgcatcgtatccacccccacctgcggcccctgtctgggcggctacatgggcattctggcagcgggcgagcgctgcgtttccaccaccaaccgcaactttgtgggacgcatgggtcatgtggacagtgaggtctatctggcctctcccgccaccgccgccgccagcgccctgaccggctacatcaccgacccgcgcacggtctgacccgaaaggagcatgagcatgaacgcaagaggttctgttttcaaatacccggataacgtggataccgacgtcatcatcccggcacgccacctgaacacacaggacgccaaggagcttgccagccactgcatggaggatatcgacaaggattttgtgaaccgggtgcagcctggtgatatcatggtgggcggctggaactttggctgcggctcctcccgcgagcacgcacccctgtgcatcaagactgccggcattgctgtggtcattgccaaaagctttgcccgcatcttctaccgcaacagcatcaacatcggcctgcccatcatggagtgcccggaggctgtggatgccatcgaggcaggggacaccgttcaggtagactttgacaccggcgtcatcaccgatgagaccaacggcaaggtattccacgccgagcccttcccgccctttatccagaacatcatctccgccggcggtctgatgaaggccatccagaaataagcccatccgctcccacgcaaacggtgcggaaccctctccgtcatcgctgcgcgatgccacctcccccgaaagggggaggtcttgcgcatctatcggtcagaagcataaaagctcccccttcgggggagctgctgagcgcagcgaagctgagagggttcatccgatgagaaattaaccaataaggagaacagacccatggaaaaaaatattgctgtcatctggggcgattgctccagcccggagatcgtaaagcagaccctccgggtgctggataaggtggctgaaaagtacggccataccttccactacaccgctgccgccatgggcggcgaggccattgacaaatacggcgacccgctgccccagcacgagctggacaagtgccttgccgccgacagcgtgctgctgggcgcggtgggcggccccaagtgggagggtctgcccggggagcagcggccggaaaaaggcctgctgcggctgcgcgccggcatggggctgtacgccaacaaccgcccggctaagatctggccgcagctggccccggcaagccctctgaagcccgagatcgtggcacagggcattgactttatcatcgtgcgggagctgatcggcggtgtgtactttggccagcaccagacccacacgctggaaaacggcgaaaagcaggccgtggacaccatgccctatgcggagcacgagatcgagcgcattggccgcatcggcttcgagactgcccgcaagcgccgcaaaaagctgtgctgtgtggacaaggccaacgtgctggacaccagtcgcctgtggcgcactgtgatgcaccggctgcaggccgagtacccggacgtggagtacagcgagatgttcgtggacaactgcgctatgcagatcgtgaagaaccctgcgcagtttgacgtgatcgtcaccgagaatatgttcggcgacatcctgtcggacgaggcttctatgatcaccggttccatcggtatgatcccgtcctccagccttggcgacggcacccggggtctgtacgagcccatccacggctctgccccggacattgcaggcaaggacatcgtaaaccccactgcctgcatcctgtccgccgccatgatgctgcggtactcctttggcatggcagaggaagccgatgccattgagaacgctgtgagccgtgtgctggacaagggtctgcgcaccgccgacaacatgagcgatggctgcacctgccttggctgcaccgccatgggcgatgccattctggcagagctttgagccgcagcgctatttttaatgaaacaagcccggaaggtctaccgaccttccgggcttgaattttttatattattacagcatcttggaaaggaaggctttcaggcgggggtgcttggggttggtgaacagctcctgcggcggctcatcctcctgaatcttgccatcgtcgatgaagatgacacggttggacacctcacgggcaaagcccatttcgtgggtgaccaccagcatggtgatgccggtgtgtgccagctccttcatcagctccagcacctcgcccaccatctcggggtcaagggcgctggtgggctcgtcgaacaggatcacgtccgggtccatagccagcgcgcgggcgatggcaatgcgctgctgctgaccaccggacaggctcttggggtaggcgttggccttgtcggccagacctacgcgggccagcagctcgtctgcgcgggcagagatggcctctttgtccttcagcttcagcagggtaggtgccagctcaaggttctttttcacggtcaggtgggggaacaggttgaagtgctggaacaccatgcccatcttctggcgcacggggtcgatgtgcgcttcgtccacctccacgccttcaaacttgatagagccggaggagggggtctccagccggttcaggcagcgcagaaaggtggatttgccgcagccggaagggccaatcaggcaaaccacgtcgccgcggtagatatcaaggtcgatgcccttcagcacgtccagcgtggggtcggccttttttgcgccgcgcttctttacgccgccgtaggtcttggtcaggccgcgtacttccaaaatcttatcggtcactttgtgccagcctcctctcaaacttgctcagcagccatgtaaacagcataacaaggatcaggtagatcagtgcaacgcccagcagggggaacatggcttcgtaggtacggttcataatgccctgtgcagcatacagcagctccttgccgccgatggtggtgatcagggaagtatccttgagcagaatgatgaactcgttgcccagtgcaggcagcaccgcacggatggcctgcgggatgatgatgaccaccatggtggtcatgtagttcaggccaaggctgcgtccggcttccatctggccggggtccacagccatcaggccgccgcggatgatctcggatacatacgcgccagagttgatgcctaaggtcagcgcacctaccatagtaaagttgcggctgttggaaaaaatgaccatgctcatgatcagcagctgcaccatcatgggcgtgccgcggatgatggtggtgtacacctgacacaccgcgttaaaaaagcccagcaccgcgtttttgtggccggggcgctgctggtcgtgggtcacgcgcaccagcgccaccacgctgcccagcaccacgcccagcgccagcgccagtgcggtgaccagcagggtggtgcccacaccgctgatgtactgcatccagcggtccttcagcagaaaggcctgataaaacttgaaaaagaaatcctgttcaaagcttagctttgtgccgctgttgagcagctctttgagcagttcgtattgcgcagccattcacatcctcgctttctgtttgtcaataaattgtaaccacttttttctaaaaaaagaggtgccccggagcggggcgcctccttgggtacggaaatggtacagggcacgcagcttagtttgcgttgatgtacttgtccacgatggcctgcagggtgccgtcagccttcagctcctccagagccttgttgacagcgtcctccagtgcagaaccctttgccatgccgatggcgtaatcctcctcggcgtagctggtgtccagcaccttcaggccggggttggcggcaacgtactccgtagcgggagcgttgtcgatgaccactgcatccacctgaccgttgttcagtgcctgcacagcggtcaggccgctgtcgtaggccacaacagagtcctcgccgaagtcatcggagcagtagatgtagccggtggtgccgcgctgggtgccgatcttcttgccggccagatcgtcgggagaagcaatgtcggaatcgttgggcacgatgatggactggatgccggttgcgtagctgtcagagaagtccatcacagccttgcgctcgtcggtcacggtaacgccagccatcacgatgtcggccttgccctgctgcacgctgagcagtgcggcatcaaactccatgtcatcgatctgcagctccagacccagcttttcagcaatggccttggcggtgtccacatcgatgccctcgatctcaccggagtcggtggtcatctcgtacggagggaaggtggcgttggtggccatggtcagcttaccagcctccacggtggtcagctcagcggcagcggcggaagaaacagcctcggaggaagcggcagagcttgccacagaggaagcagcagagcttgcggaaccaccgcaggcggtcagagccagagcagcaacggaaacagcagcggcagccatgaagctgcggcgagagatctttttcatattcaaacactcctcaatctatgcaatatagttcgctttgccccgatgggatgcgattcatcgcgctttcggggaacgcacttagtatagtttgtacaaaacgaaaagtcaatacttgtgcataataatccgtgaaattgaaacgattttgcaaacatttatgcaataacggagaaaatatgtgaatatatgcagtataaaccggcttttacaggcttcttgcaagctcctccgcgctgcgcttaggcacgcagtagtcgcggttttcgtccagatagtactttacaccggtctgctcggtcatggggacgatgctggctttgtgggtggggtagccaaaagccaccataaaggccagcttctgcggctcctcaatgcccagcagcgcggtcagggcgggcttattgatcgcgcccatgatgcagctgcccacgcccttgtcccatgcggcaagggtcatgttggcaagtgcaatgccggtgtcggtggcaaggtcgccgggaatggcggtatcctgcaccacagctgcataaaaggtgggcagctcgtccgccttgggcgtgccctgctccggcggcagatagccagcccatttgaccagcggctgtaccttggccaccatctccgggctttgcaccagcaccagacgcaccgcctgccggtttgccccgcaggaggacagccgcacggcctgtacgatatcatccaccacatcctgcggcacggccttttgtgcaaaccggcggtaggtgcggcgggtagtcagaagttccataacagacattataaatcgctcctttatccggtaaaatacaaaacggaaaaaaactatataaagtataacagatgcaccggcgcacagcaatggctgcggcgtggttttttgcggatacggcggctgtattgtaaaggatagtgacacttattcttgtatccttgtatttttttggtgaatgtttccatgaaatacttgacaatggggggtaggtaaaggtattatataggtgtaaacgcgttacatgcagtgtaaggcgtgcttgaaagaaagattgtgaggttgattattatgtctaatatctctcgtcgtcagttcctgaagggcgcaggtgtcgctactctggctgttgctgctgctggtgttctggctggttgctctgctgaagaagtcctgactaaggacgtcaaggttgtctttatgtgcaatggcgctaccgtgggcgatcagaactacctcaaggttgcacaggataagaccactgttaaggtgtctgagatccccaacaattacttcccggttggctataagaccgtttctactggcgagctgaagatcgctaagcttcctaccggtgaagatggcgttaaggtgatgctggacgaaatcgaagtgccggtggatatctattactatgaggtagttgacggcaaggaagtcgatcggatgatctttgagggcgtcacggtttatgcaagccagaagactatcaccaagaaggtggcagaacagtatgcaggtgatacttatactgtcgtgggcgatggtccgtttaccatcaactggagcaacaataccgttcgtgtcgaggcaaagaaaaactaagtctttgggcagtttttgctcttaacgtttaatgtaaaaaaggacggcagtcgtgtgactgccgtccttttttacatatagtcattttcgccgttttttcgggataggcacgcacagcaccaaactgatgccgatggccagcgccaccgcaattttaaaggtgctgatgcccttggcaagggcaagggtgttttcgttctggatgaaatagtaggcggtgtagtagatgcccgcgcccggcacaagcgggaaaatgccggtcagcaaaaacaccgtgaccggcgttttttgagtaatggcaaacacgcgggtaaggatggtaagcggaatgaccgccagcagggaggccgtggcggcgtctgcgcccagcagggtcagcaactcgtaccacagccagcccacagcgcctaccagcgcgcagtagggcagacagcgcctggggcatgcaaacagaatggcaaaactcagcgtgcctgccgcggccagaaaaaactgcgcggtcagctcgccgatctgtgcagctgtaagggacatcataccacgaccacccccgtaagtaccgtgtacagccgcagcacaaggccggtgcctatggcaatgctggcggcaatgagcaaagcatcgatcatgcggatggtgccggaaaggtaatcgccctgcacaaagtcccggatgcccatggtaaaggcgatgcccggggtcaggatcatcagcgtgccgatgatagcgtggctggcagaggtgtgcagcagattgcacagcagaatgcacaccagcgtgatcagcgcggcggtgctgatcttctggaagccgccgggcacctcatgccgcccgcaccacagcagataccagctggccaccagccccgccccggcagctgccagtgcactgcgcaggttgccgccgaacatcatggcaaagcagaacgccccgcacagcccggaaagcagctgcacatgatctttggggaagggcagctgccgcgccagcaccagacggctctcggcttcgtccaaggtcatccctgtctgggcgatctggcgggaaagctcgttcaccgccgccacccgccccagatgggtggtgcgcaccggtacgttgcgcaccccgctgatctcggcagtgccggcactggcaaaaatgccgttggtcagcacataaacgtggaactcccgcagatggaagctgcgcgccatgatctccatggtctgctccacccggaacacctccgcaccattttccagcagggtctgccctgcggccatgataaaatccatgatgcggcggcgcagctcttcatcgggaaaatggtctctgctgttcattgcctgcgctccttgcaaaagatgataccctattttatcatgtgcaccagccgcatacaagggcgtataataaaaagctctggaaacaccagagctttcttgcgaaaagggtcggaatatgttataattgtcctgtcgctgaaaagcgatcgaaaggtactgcacatacggcaggcggttggctctcacttccggaaggaggtgagaacatgcctattactttgacattccacttgtttggatttacgtttacgatcaaggtaagaaagtaaaaaccgccaccccccacaggtgacggtttttctttggataaaagttaaactaaaaacctaaagggccaaccgcttgtcgcagtgccttttgtagttatagtataaccctttttgtgcgcattgtcaagcaaaacgggcgcggcaaaaggccggaagccatatccctacccaaaaacttcgttgaaggtgttgacaaatgccgccgatgggtttattatagtgtcaatatcacaaaaatggctgtgaagagaagagtaggccttcgcattgatccttaccagagagcccgggcggtggaaaagggcaggaagcaggaagctgaaaatggtctcggagccgtgcggacgaggcgcaggagtgctaagcccgcaacgggatgcgcccgttacagcgtccggctgtaagcagtacacgctgccgcagcatcgaggctgtatccgtaagggtacagtgaaccaaggtggtaccacggaagtatgttcatgcctccgtccttgcagagtctaaggctcgtaaggacgggggcattttttcattcatccgttcaaggctgcgcgcggaaaggtgccgtgcgggccgcagtacataatagagaacaatagagagggaacaaaactatgattactcgtcgcgattttctgaaagttaccggtgtggcagccgcagccgctgccctgactgcctgcggtggttcttcttccactgcttcttccgccgctgcatccggcagcgtggcatcttctgccgctgctaagctggataagatcaaggtggctgtgcccaacgataccaccaacgaggcccgtgccctgaccctgctggagaagaacggcttcttcaagctgaaggcagatgccggcctgaccgccaccaagaatgacatcgaggagaaccccctgaacgtcaccgtggacgaggtggaggccgctcaggtgcccaacgtcctgcaggacgaggactacgccgtcatcaactccaactacgccatctctgccggtctgaaccccatgaccgatgcactggccatggaggacggctcttctgcttacgtcaacattctggtgtgcaaggacggcaatcaggaggagcctaagatcaaggctctggctgctgccctgcagagccagaaggtgaaggacttcatggacgagacctacaagggctccgtggtgtccgttgtggagaaccccaccgacggctatgattccactgtggattatgacgctctgaacggccagaccgtcagctgcgccgctactcccgctccccactgcgaggtgctggaggtgtgcaaggagatccttgccgccaagggcatcacgctggacatccaggagtacgacgactatgtgatccccaaccagatcgtcgaggacggtcaggtagacaccaactacttccagcatcagccgtatctggacaacttcaacgccgaaaagggtacccatctggtatctgttgccggtattcacgtagagcccatgggcgtctacggcggcaagcaggacagtctggcacccatcgagggataatctaccatcgagggataagctaaaggagcaatttctgtgatcgaactcaagtatctttccaagaccttccagatgaaggatggcgcggtgaaagcgctgcagaacatcaacctcaccattcccgatggcgcaatctacggcatcatcggcatgtccggtgcgggcaaatccacgctggtgcgctgcatcaacctgctggagcgccccaccggcggcagcgtggtgatcgacggcgtggcaatggagactttgtctcccgcctcgctgcgcaagcgccgccgggagatcaccatgatcttccagcagtttaacctgcttatgcagcgcacctgcctgaagaacgtctgcttccccatggagctggcaggcgtgaagaaggcggaggccgaaaagcgcgccatggagctgctggagatggtggggctgccggataaggccaatgcctacccggcacagctgtccggcggtcagaagcagcgcatcgccattgcccgcgcactggccaccaaccccaaggtgctgctgtgcgacgaggccaccagtgcgctggaccccaacaccacccactccatcctgaccctgatcaaggatatcaaccgcaagctgggcatcaccgtggtggtcattacccaccagatgagcgtggtggaggagatctgcgacagcgtggccattctggacggcggtgtggtcgtggaacagggctcggtacaggaaatttttgcaaaccccaaaacggcggctgccaagcgtctggtggctcccaacggcggcagcgcagcgcgggatctttcctgctttgcgccggatgaccatgtggtgcgcgttacctttaatggttcctccactgcaaagccgctggtggcaagccttgccgccgaaaagggcattttggtgtcggtgctcagtgccgatacccgcgatctgagcggccagtgctacggctccatgctgctcaagctgcccgcagaacttgcggtcgcacagcaggctgtggagtatatgcgcagccagtccggcgtaacggtagaggaggtgaccggtatatgaatatcgcagcttacggctttgccatctgggagaccttttatgtaacggtgctctccaccgcctttgcgctggtgctgggtctgccgctgggtgtgctgctggtagccggtgacaaggatggcattctgcccctgcccggctggctgatgcatctgatcaacattgtcatcaacatcctgcgcagtgtgcccttcctcattctgatgatttgcgtgttcccgcttacccgcgccatcgtgggcactacggtgggcaccaaggccaccattgttccgctggtggtcgccgccttccccttcgtggcacgtctggtggagaccagcctgcgggagctggatgagggtgtggtggaagctgcccagagcatgggcgctaccccgtttcagatcatcaccaaggtcatgatcccggagtgcctgcctgggttgatctccagcatgaccaccgcactgaccaccattctgggctactcggccatgtccggcgttatcggcggcggcggtctgggcaagatcgccctgtcctacggctactaccgctaccagaccaacatcatgatcgtctgtgtggtgttgctggtgctgatggtgcaggcgttccagtctgtgggtaccctgtgggcaaccaagagcgataagcgcctgcggaaataaaaagctttgaattttcgattccccgccggaggcagcccctcctgcggggaatcgtccttcccgaccaaaaaacaagcaaaggagtatgttgtatgaaccgtgataccatctgcgtgcagggcggctacacccccggcaacggcgaaccccgtcagatccccatcatccagtccaccacattcaagtacgctaccagcgaggacatgggcaagctgttcgatctggaggcagacggctatttctattcccgcctgcagaaccccacctgcgacatggtagccaaaaagatctgcgagctggaaggcggcaccgccgctatgcttacctccagcggacaggccgcaaacttctttgccctgttcaatatctgcgaggcaggggaccacatcgtagcctccagtaccatctacggcggcaccttcaacctcatctcggtcaccatggctaaaatgggcattaccgccaccttcgtagaccccctgtgcaccgaggaggagctgaacgccgccttccggcccaacaccaaggtggtgttcggcgagaccatcgcaaaccccgccctgaccgtgctggacattgaaaagtttgccaaggccgcccacgcccacggcgtgccgctggtggtggacaacacattccccacaccggtcaactgccgcccctttgagtggggcgcggacatcgtgacccactccaccaccaagtacatggacggccacggcgcagtgctgggcggtgccatcgtggacggcggcaagttcgactggatggcgcacgctgagaagttcccgggtctgtgcaccccggacgacagctaccacggcatcacctacgccgagcgcttcggcaaggagggggctttcatcactaaggccaccgcgcagctgatgcgggacttcggctccatgcagtcccccatgaacgcctatatgctgaaccttggtctggaaagcctgcacgtccggatgcagcgccactgcgccaacggtatggcggtggcacagttcttggagaaccaccccaaggtggcctatgtgaactactgcgggctggaaagcagcccctaccacgcactggctcagaagtacctgcccaatggcagctgcggcgtggtaagctttggtctggccggtggacgtcaggctgccagcacctttatgaaggagctgaagcttgccgccattgagacccatgtggcggatgcccgcacctgctgcctgaaccccgcctccagcacccaccgtcagatgaacgacgagcagctggctgccgccggtgtgcccgccgagctggtgcgcatgagctgcggtctggaatccgccgaggatctcatcgccgatatcgcgcaggcactggataaggtctgatgccttcccgtgaaatcaaaaatcatgatacccctgaagatggcaaagcgaacgcggcgccatttttgaatcgtctagcaaaggagcgactttcctatgccgctgatcattcccaagaccttacccgcctttgacgccctgtatgaagaaaacgtctttgtcatgcaccgggagcgggcgctggcgcagcatatccgtccgctggaaattctgatcctgaacctgatgcccaccaagatcgccaccgagacccagatcgcccggctgctggccaacaccccgctgcaggtgcacatgaccctgctgcaaactgccagccactctgccacccatgtgtcggctgcccaccttgaggccttttacaagacctttgacgaggtaaagaacaaccgctacgatggcatgatcatcaccggcgcgccggtggagaccatggattttgagcaggtggactactggaacgagctgtgcgagatcatggacttcagcgaaacgaacgtctactccaccctccatgtctgctggggcgcacaggccgggctgtactaccactacggcgtgcgcaagcagctgctgccggaaaagatgttcggcgtgttcgagcaccgggtcacccgcccggcaaacccgctggtgcgcggctttgatgaggtgttctacgcccctcacagccgccacaccggcatctgccgggaggatgtggacaactgcgccgccctgcgcattctggccgagagcgacgccgccgggcccttcctcatgagcaccgagaacgggcggcagatctttgtcaccggccacccggagtacgataagtacactctggatgccgagtataagcgggacgtagccaagggcctgcccattcatgtgcccgtcaactactacccggatgacgaccccacaaagccgccgctgtttcgctggcgcgcccacgcccacctgctgtatgaaaactggctgaactattacgtctaccagaacaccccctacgatctgggagatatccaacgggtaaaacacgagaaataaataacaaaaaggactgctacgaaacagcgtcaacgaaaaatgcaaaaaagctgagcacctgatctttcacagatgctcagctttttttacccttttttgagaagctgctttggagctttcaacattttgaaggtatgctattctgcggcagccctctgccggatgtttttaccctctggggtggccggtatatgtcagcgctacggtgtcggggccggtgttggcagagaccacgccgcccagctcaaacacggccagcggcggcttgccaaaggccttgcggcaggccttttccagatcagcggcctgcgggatgttggtgtggccgatcatatactcaaaatcctccacatccccggcgcgcttctggcacagatccaccatggcgggcacgactttttcatcgccgcgcaccttggcctctaccttggttttgccgtcgatcagggtaatgatggggcggatacccatcaactcacccatgacggctgctgcggcagagatgcggccgctctttttcatctgcctcaggctgtaaggccccagcacgacctccatgcagttcatctgccgttcaaattcgtggatgacgtggcggatctctgcgccgttctgcagtttgcgtgccatctcgcacagataccagccgaacaccatagaataggtgtgggggtccagcaagtggatgttcagatggtgttccgggcgctcctcccgcagcatcccctgtgccatcagggcgttgttgtaggtggaggagccggatttgttaatgggcacatggatgacatccgtgtagccctcgtccacatactggcagtatttttcacagaactggatgggcgtgatggcggcggtagagggcacaccctttgccgcacgcatcttatcgtagaattcggtgttggtgcagtccacacgctcaacgtagtccacatcatccagcaggatgtggaaactcatgatatcaatgccgtatttttcggccatctcctgcgggatatcgcaggaggaatcagtcagaattgcaatcttgctcataatttccctcatttccattcataatctcgtaggtggccgtggtccagcagctccgggaaatcccactgccgcagcacctcgtacacgcccaccgccacgctgttggaaaggttcagactgcggcaggtgtcccgcatgggcatccggatgcagtgctcctgattttctgcaagcagcgcctccggcagcccggcgtcctcgcgcccgaacaccagataagccccgtccgggtactgtacatcggtgtagcgctggggtgccttggtggtaaagtagtagtaggggccgttgttgcgggcaaaaaagtccgcaaggccgtcgtagtaggtaatgtccagatagtgccagtagtccagcccggcgtgcttgagctttttgtcatcaatggcaaagcccatggggcccaccagatgcagacggcaggccgtgcaggcacaggtgcgcgccacgttgccggtgttctgggggatgcggggctctaccagaacgatattcaaagtcggcttgtccatcataaaatgccctccggttcctcccgcagggggcacaggcggggcagcagcggctcaaaccacacgccgaagcgggtgtcctgcgtgtagggcgtgccctgaatggccagcgaaacaaactccgcagcgttatcggcggcggcgctcagggcgttgccctgcagcagcgagccgatgagcacggcaccatacagatcccccgtgccggggaagctgcggctgatatgcagctttttgatgacgaagcggtctgcgccggtaccggcacagccgatgtacttgcccagcggcaatccggtgaccaccgcgttggaggccagcggctgcaaagcatctgccagcgcctgcgcggcggaatcgtccagctcatcggtgaccggctgctgctgcaaaagcagctgcgcctcggtgtagttgggcaaaatcagatctgccgcgcggcacaggctgcggatgcgctcgaccagtgccggggtaacggtggaataggccttgccgttatcgcccattacggggtccaccaccttgtaggcggcaggccacagggcaaaggctttttcagccagcgctacctgcgcctcgccgcccagatagccggtatagatacaatcaaattgcagtccaagggtctggtagtgctccagtgcggccatgccgtaggcactgccgtccatccgggcgggggtgccaaggccgccggtgtgggtggagagcaccaccgtgggcagcgccaccggctggaagcccatgaccgacagcacaggcaggatcaccgcaaggctgcaccggcccacgccggacaagtcgtggatgcaaaggatctttttgggttcaacgggtttttgcaaataggaaaacctccttgctgaaaagccgcgcgcagcggcttataaaaagcatcatagaacagtataccacaaattgctgcataaaaaaagcgtataccagattcttttgcggaaataatagcactgcaagccctgtcatgacaggccgaaaggagaaattcaggatgaaacagcgagaaaattccgccgcaggcatggtggtgggcatggccaccggtgcagtccttggggctgccggtgccatgatggctacccagagcaagcgccagatgcgccgcaatgtgcgcaaggtgatgaagggcgcggaaaatgcggtgatgcagctggataaaatggccgccgactttgtggaaaagcacatcgactgctgaacagcaaaagcgccgtcccgggtggaacggcgcttttgttatcgtgcggtttattttgcccagatgcacatccgggcggtggtgttgatctcgcccagcaggctcagatccatctggatgttgcaggtcacggtcagcgccttattcacatcgctgccggtcagcaccgaggcaggcaggtttttgatggtcaggatgccgttgcccttttcgatctcgccggtcagggtgccggtgtaggtcacatcgccgatggtcaggccggtcagacagccggtcacattgagcttggtcacctgcttgacgggcagcatcagggtgtaggtgccgttggactggcgggcaagggtagcctcgcggtcagaatcaatgccggagttggccatggattccttgtcggagttttccttccagaatttgaccccaacgggggtatttgcggcggcagaagcgcccagtgtgagcatgcagaacatcagcagcgtcagcagggcagcgccggtacgttttaaggcagtagtcatggttttatcctttctgccgcagctacggcatggtgaaacagagtatataatgctccataaggtgctaatttgtcaatactaacatagcatgaccggacagccttgtcaatgcgccttggcagtctttcacaaaaatgtttcgaatccaacacagaatgtggaagatgtgataaaaaaggacgctgcggcattgcagcgtccttttgggtggttacgttatagcggctcagacctcaaagttggggtcgtccttcagcatgtggatgttggacataaaggcgctctgctcggggtcggtgaacgtggcgtccttcacatacttgttcagcacagctgcggtgcgcacggggtcggcaatggtaccggcaccgccgatgcagccgccggggcagcccatgccttccagcaggtagccgttgtacttaccggccttggccagcatcagcagcttcttgcagtcggccagaccctgtgcggaggcgatcttcacctccatgtcgggacgccattccttgatcttgtcggcaacggccttggccacgccgccggactgtgcaaagccgcggccggcagcagaagcgtagcacagatccatctcggcgggatccacttccagattgtccagatccaggtcctttgcctcaatgataccggccagctcttcaaaggtcagcacgaagtccacgtcggagcggacggtgcggcgggaggcctccagcttcttggcggcgcatggtccgatgaagcacatacgggcatcggggtcggcctgcttcatcatgcgggcggtgaacaccatgggggtcatggtcatggagatgttcttggcaaggccggggaaggcggtctttgccatcatgctccatgccgggcagcaggaggtagccataaagtccagcttctcgggcacttcctccaggaagtcgtgtgcctcgtccacggtgcacaggtcggcaccgatggcaacctccaccacgtcgcagaagccgatggccttcagggcggacttcagcttaccggtggaagccagagaggggaactggttgatgaaggcgggagcgaccagcgcatagatgcggtcgccgcggttgaagccctgaatgagctgatagatctggcccttgtcggcaatggcaccgaaggggcagttcaccagacactgaccgcaggacacgcacttgctgtaatcgatctcggcacggcccagctcgtcagagtggatagcgcccatgccgcaggcagcagcgcagggacgctcggtcttgacgatggcgttgtaggggcagacggtgacgcagcggccgcacttgatgcacttgtcctgatcgatggtggaacggccgctctcccaagtgatagccttcttggggcacacttccatgcaggggtgtgcaaggcagccctgacacaggtcagaaaccttgaccagcttttcggggcagcggttgcaggcaaacttgatcacgttgaccagcgggggatcatagtacttatcggcgatggaagcatcctccagaccggagaccacgctgttgtgctcgtccatgcggcgggtaggcagacccatagccagacgcacgcgctcctcaacgatggcgcgctccaggaagatgtccttgcgcagcttgccctcctcaccggggatgatggtgtaggggatcttgcgcatcaggtggttggcctgctcgcccttgacattggcgtaagccatgcgggcgacctcggtaaacacctgacggcggatctggatgaccgtagtattgattcctctgaaactcattccaatctctccttgctcagaaacagccaaaaaacggagccgcctgccctgtgtgcagagcataaaaacggcgctatacgggcgcggatggtaccgtgctggttgcttacagcacgccggacccgataaatccatcttcattttaacataaagacgtgcgtatggaaagagcaaaacacaaaatttgttaaaaatttattgtattcatgcggatgcacagaatgtacaagtaaaatgaaaaattttcagcaaagtgctgcacgcacccgctcgccgtcgtagcggcccagctttacccgcacgatctgcccgctctcgcagccgggggcagagaccaccaccggaatgtacagccgggtgtagccggtgaacagcgtaccggacaggggcgtttccagcagcacctcatcctcggtgccctcaaaggcggccagtgcctcgcagcgcacctgctcggctacggcgttcatgcggcggctgcgctcctgcttttcccgctcgtggatctgatccggaaaatcataggccggggtgccgctgcggcgggaataggggaatacatggaccttgacaaagccgatcttcttcaaaaatgcgcagctctcctcaaagtcctctgccgtctcgccggggaagccgcagatgcagtcggtggtaaagctgaccgggcggctgccgtaggcggcgcggatctgctccactacctgtgcatattcctgcgcggtgtacacccggcgcatccggcgcagggtggcggtgcagccgctctgtaggctcagatggaactgggggcaaagcttgtccaccgccgctaagcgggagataaattccggggtgagcatatcggggtcaaggctgcccagacggatgcgctcgatgcccggcacctgtgcgcatttttccaccaattccacaagattcgtgccggtgtccagcccgtagctgggcagggagatggcgctgagcaccacctcgcggtagcccgcagcggccagctggtgcagctcggccagaatgctctcctcggcgcggctgcgcaccggcccgcgggcgcgggggatgacgcagtaggcgcactgccggttgcagccgtcctctaccttgataaaggcgcgggtgtgggtctcgaaccgttccaccggcagctcctcgaactgctcgccgcgctggtgcggggcaatggctacgatgcgctcgtggccgtccaacagcttttgtacgttctccaagatggccttgcggtcgccgttgccgcacacaagatcggcctccatgaactgtgcggcctcctccgggaaggcctgcgggtagcagccggtcagcaccgtcaccgcaccggggttttcgcgctttttgcggcgcagccacttgcggctcttctggtcgccgaagttggtcacggtgcagctgttcacaatgaacacatccgctgcttcgccttcctgcgcaatggtaaagccgttggcgcggaacagctgttccagcgcaccggtctcgttcaggttgaccttgcagccgagggtataaaaacaaactcgcatggggaacgatcctttcgataaaaacgggggtgttttgcatttcttctcattatataacagaagcccaccggggtgcaagactgtttttgcacggagacaccggtcttttgcagtgcgtcaaaacaaaaagggacgcgaaaaatctcgcgtcccaaagctgcaggaaggaatgacgagccgttagctgtttttcagggtaacgaacagataatcggtctccttgccgtccagtgtatcggtcttgcgctcaatgaaatcgacctcgtacatagacaggggaagctgacgtctcacaaaagcgttgatggcgttctcctgggcgtccggcttcaggctggccacgacagaaaactgcttggtgtccagagccttctggatatctttaccgatcacggtagcagagaaccggacgggcagcatgagctgaccggagcagccggtgaacagggcggcacctgcaacagcagcagcggacagaccggcgatctttataaagttacggcgggaaagattcataatgagaccctccttgtgattgcatgattgtatgaaactgggcttgctcccttctgggaacagttcaattttacaagttttgccgtgaaaagtcaagggacaggtaccaaagttaacagaaaacgaacacaatatgaaaaatagtacggcaaaattgacgagcggcatgcctgaaaagaccactgcatacagtagcagcaagagacttcgcacggggagggacggaaatggaacggagaaatctggcgctgctgtgcgcgggggtggtctgcttctggctgtttgcgctggccttcggcacggcgcagggcaggggactgcgcatccaaccggcggtgcaaacgcaggcggaaccggcagcacagaccctgacggtcaccccgccgcagcttaccctgccctgccgcgcggcgatccttatcgaccagaccagcggcgcggtgctttacgagatgaacgccgaccagaccatgcccatcgcctccattaccaaggtgatgaccctgctgctcacctttgaggcagtgcacgccgggcggctgaccatggataccgctgtgccggtcagtgagcacgcctaccacatgggcggcagtcagatctggctggagcccggggagcagttcacgctggacgagatgctcaaggccatctgtgtgtcctctgccaacgatgcagcagtggcggtggccgagcttgtgggcggcagcgagcctgcctttgtgcagcagatgaacgcccgcgccgcagagcttggcatggagcacaccaccttccgcaacgcctgcgggctggacacagaagggcatctttccaccgcaagggatgtggccatcatgagccgcaccatcctgaccacctgcccggaggtgctgcactataccggcatctggacggacaccctgcggggcgggcagacccagctggtgaacaccaataagctgctgcggcggtacaacggcattaccgggctcaagactggcaccaccggcggagcgggcgtgtgcattaccgccagcgccacccgggacgggctgaatctcatcgcggtggtgctgggtgcaccctccagcaaggaacggttcgaagccgccactaccctgctggactacggctttgcggcctaccgtgccgcaccggtgcccctgccgcaggaacgtccgctgcaattaaaggtaaagggcagcaccgaggagaccgtgccgctggattacgctgcgctgcccaccaccgcgttgctgcccgccgaaagcgccggtcagctgaccgtgcagctggaactgcccgacacgctggaagccccggtgacccgggggcagacggtaggcaaggcgcagctgttgtgcggcgaagcagtgcagggggagtacccggtgtgcgctgccgccgatgcgccccgcatggattttggcaccgcgttgcagctgctgtgggacagcctgcggggaacagcagcctgaccctgtgccgaaaaaggcgcttcagcgcacaaaagtgcgccggacgcccggcgggactgttggatacctgaacaaatctggatgaagaaacaaaaaaacactattaaaattgtatgaaatctaaggaatttgaccttgactttacccggagggaacggtacacttataccaagatatttcctcgcagggcaaaggcccggcagatcgtttggaggttttaataaaatgagtgtcgcactgaacacgaaacacctctccagcttcatcagcgaagaggaatatgcagccatctacccgcaggtagaagccgcccacaagcagctggaggccaagaacggccccggcagcgattttctgggctggatgaccctgccccgggattacgacaaggaagagttcgcccgcatcaaggcagctgctgccaagatccgcgaggactccgacgttctggtcgtggccggtatcggcggcagctatctgggcgcacgcgctgttgtggaggctgttaagggtatgtaccacaacgagctggaggatggtctgaagatctacttctgcggcaacagcatcagccccacctacctgaacaatatcatcagcctgtgcaagggcaagcgcttctccatcaacgtcatctccaagtccggcaccaccaccgagacctctctggccttccgtgtgctgcgcgagctgctggaaaaggagatgggcgtggaggaagccaacaagcgcatctacgccaccaccgaccgtgccaagggcactttgaagcagctggctgacgcacagggctggcctacttttgtagttcccgatgacgtgggcggccgctactccgtgttgagcgccgtgggtctgctgcccatcgccgctgccggcatcgacatcgacgctctgatgcagggcgctgccgatgctatggagcgcttctccgtactgagccccgacaacgatgcttataagtacgccgccatccgcaacatcctgtaccgcaagggcaaggctgtggagatcctggagtgctacgagccggacttcaccctgatgaacgagtggtacaagcagctgttcggcgagagcgagggcaaggacaacaagggtctgttccccgcaagctgcatcttctctaccgacctgcactccatgggtcagttcattcaggaaggtgcccgcatcatgttcgagaccatcgtggacgtgaagaagcccgcacaggatctgttcatcgacccgctggagggcaactttgacggcctgaacttccttgcaaaccagaacatgagcgtggtcaaccgcaaggccatggaaggcaccattctggcacacaccgacggcggtgtgcccgaggtgctgatcgaggtggatgacctgtctgcttataatgtgggctacctgatctacttcttctggcgtgcctgcgcctgcagcggctacctgctgagcgtgaaccccttcaaccagcccggcgtggaaagctacaagaagaatatgtttgccctgctgggcaagcccggctatgagggcctgaccgcagagctggaggcaaagctgaagtaagctgccgaacgttaaaaatgatctcccgccgcaaggcgtggaaaatacaggaggactgaactatgattaaactgattgttggtaccaagggctccggcaagaccaaggctatgatcgaccagatcaacgacgcggtcaagacctccaaaggcaatgttgttgttgtggaaaagggcatgaagctcacctacgacatcgctcctgcagcacgtctgatcgatctggacgagtacaagatctccggcggcgaaatgctgtacggctttgtggccggcctgatggcaagcaactacgacatcaccgacctgtacattgacggcatcctgaaggtgctggaccacgatatcaaccgtctgggcgttgtgctggacgagatggcagccattgccggcgacagcgtcaaggtcaccgtgaccgtcagcgcagacgaggccgcactgccccacgatgtgaagaagtacctgtgatctgataaaagaacagggctaaaggcttttccaacaggcagaagaccggagaaaaataaattttttcggttttctgcctgttttggtgttgacaaagggttgctttggcgctatactaacaaagcagccttttcagaggtgtactatgcaatttgacctgagaaagtttatcacagccggcacaagaccgtaccatgcagagtttcagtgtgatttatctgcgtacgattatgccggtgcaaggatcccgcagccggtcacagccgtctttgacgcgcagaccgatggcgacgaggttcagataacgttgcgggcaaaggcatcggtgcacggagagtgcgcccgctgtctggacccggtcacccgggaagagacagtcgatacggagtggatcgtcaaggagcgggatctggatgacccggatttcgatcttccgctggacgaaaaaggacacttggacgtggacgaatggctcaatcaggagtttatgttccagatccctacggtgctgctttgcagccccgactgcgccgggctttgcccgcagtgcggtaagaaaaaggcggaatgcacctgcccaccggcagagcagaccgacgcccccgtagacactaggctcgcgatccttaaatcactgctgaacagataaacccatcaaggaggtgcaaaaatatggcagtacctaagagacatctttccaaggcccgccgcgacaagcgtcgcagcaatgtttggaagctggaggcccccgcactggtgaagtgcagcaactgcggctctctgaagctcccccaccaggcatgtggcaactgcggttactacaagggcgaggaagtcatcaagaaggcctaatttgcgcgtaattggtggcataatggtgttatgtacagaaggggagggcgcaaagccttccccttcttgtgctttaaaggaggtggatgcagatggcgatacggatcgagcaggtggatgccggcagcgaggccgaggctcttggccttgcccccggtgacgagctgttgagcgtggacgacaacgagctgaacgacacgctggattacgatttttataccgacagcagcagcttccacctgaaggcccgggtagcggacggcatccgggagtgggaggtgcagcggccgcagcgcggcccctttggctgcgggttcaagacctatctgggcgatgcaaagcattcctgctccaaccactgcatgttctgcttcatcgaccagctgcccccgggtatgcgcgagagcctgtatttcaaggatgatgacgagcggctgagctttttgttcggcaactacatcaccatgaccaatatgcaggatcacgagatcgaccgcatcatcaagatgcacatctcgcctatcaatatctcggtgcacaccaccaacccccagctgcgggtgcggatgctggccaataagcgcggcggcgaggtgctcaagtacctgccccggctggtggagggcggcattgccgtcaactgtcagctggtgctttgccgcggcgtgaacgacggcgacgagctgcgccgcacccttgccgacctgctggagctgacccccatggtgcaaagcattgcagccgtgccctgcggcattacggattaccgcaaaaatctgtacccgcaggtgccctacgatgcaaagaccagcgctgaggtcatcgacattatggaagaattcggtgatgaatgcaagcgccgccacggcaagcgcatcatctaccccagcgatgaatggtacctcaaggcggggcgccccatccctgcggcagcgttctacgaggactacgaccagctggaaaacggcgtgggcatgatgcgcctgtttgaggaagaatttctggccgagctggacaagccccaccgcatctacggcaccaaggagctggacgtggtcaccggcaccatggcagcgcccctcatcacccgcatgatggaggagctgcaccgccagtaccccatgatcaccgtgcacgtccacaccatccagaaccgctttttcggtggcaatgtgggtgtgaccggcctcatcaccgccaccgatatcatcgcccagtgcgatggcaagcttgccaccaaaacgctgggtatcccggctgtgatgctgcgggaggaaaaggataccttcctggatgatatcacggtggagcagctggggcagcagctgggcgtaaaagtggaggtgctgcccacggcaggtggggacgaagcccgcgccttgctgcgcagcggcctgcacattgcccgcagaaggaagagcggcagctgataacgccatttttattgtattttaccccttttaagaaaggaggagaccccatgagcaaaccgatcgtagcagtggtgggccgccccaacgtgggcaaatccaccctgttcaataagctgtgcggccagcgccttgccattgtggaggataccccgggcattacccgcgaccgcatttttgccaactgcgagtggaacggccacgagtttttgctggtggataccggcggcattgagcccaaggccaccgagggcattctggcccacatgcgcgagcaggcgcagatcgccattgacaccgccgactgcatcatcatggtcacggacgtgcgcaacggcctgaccgcagccgacgaggatgtggcacatatgctgcgccgcagccataagcccatcattcttgccgtgaacaagtgcgacaaggtgggcgaggctcccatggaactgtacgagttctacaacctcggctttgacgaggtgatgcccatttcttccgtgcacggtcacggtacgggcgatctgctggatgcagtgtgcgcccatctggacttcagcgagaccgtggtggaggaggatcgtatccccgttgccatcatcggccgccccaacgtgggcaagtccagcctgaccaaccgcattctgggcgagaatcgtatgatcgtggccaacgaggccggcaccacccgtgatgccatcgacaccccggtggacaacgcctacggcaagttcatctttaccgataccgccggtctgcgcaagcgcagcaacatcagcgatggtctggagcgctacatggtggtgcgtgcactggctgctgtggagcgcagccgcgtggcgctgatccttgtggatgccaccgtcggctttaccgagcaggacagcaaggtggcaggctacgcccatgagcagggcaaggcctgcatcatcgtggtgaacaagtgggatgccgtggaaggcaaggagaccaacaccatggagctgcagcgccgcggctatgccgagtgcttcagctttatgggctatgcacccattatcttcatctctgcccagaccggctacaacgtgaacaagctgatgcagctgatccgggatgtggatgccgagaacggcgcccgcgtgcccaccggcgtgctgaacgagatgctggcccgcgcgaccgcccggatgcagccccccagcgacaagggccgccgcctgaagatctactacctgacgcaggcctccacccgtccccccacgttcgtggccttcgtgaacgcaaagcacctgttccacttcagctatcagcggtatctcatcaaccagatccgcgaaaactttggtctggagcatacgcccatccgtctggtcgtgcgggagcgcggctccggcgaggtgggtgccaaggacgtataacacgtcagggaggctcagatgatgaaatctgttctcatcgctgtggtgtccgctgtgcaggcgtatctgctgggcagcatcgacaccggtatcctcgtcagcaagtttttgtaccacgatgacgtacgcaagtacggcagcggcgctgcaggcatgaccaatatgctgcgcaccttcggtaaaaaggcagcggcacttaccgcttttggtgatgtgctcaagggcgtgctggccgtgtgcatcggccgctggctgttcaccctgatgccggaaagcaccatgctctcgccctatctggcggtgtaccttgccgccatctttgccattatcggccatttgaaacccctgtatttcggcttcaagggcggcaagggcgtgctggtggcgggcggcaccattctggccatccagccggtgctgatcccctttctggcagtcatctttctggcctgcctgctgcccaccggcatggtgtcgctgggcagtgtgaccatggcggcactttacccggtgctcaccatcctgtacggggtgttccggggctattctgccgccgaccttaccgtgtgcaccatcggctcggtgatcatggccgcaatggtcatttacatgcaccgctccaacatccagcgcatccgcgagggcaaggagtaccgctttggccgtcacggcaaaaagtaacagaaaatagtaaaccaccccgcagcagccgttcaccggccgctgcggggtggtttttgtatatgcttattcctttgtctcggtctcttcctcaggctttgcttcggaatgccgccgacggaaccagtcggcggggatgccgctctgggcgggggtaagatccggcgcaggatgaccgtccggcaggtgtgcgccaaaggccgggacaaagaagaacttgcgcacaatgaagatcagcgcaatcgcgccaacgctgagcaggttctccacggcggaatcgtgtcccaccaccagatggcgggcaatggcgtacagcagcacctcaaggctgctgccggggctgtgcttggccagcatcttgatgaactcaatgccgatcacaatgtccaagctgcgctccagaaaggtgcggatctctgcctcgttgccatcgaacagcaggccgggcatccagcggatcaggggcacaacgctgagcagcagaccaatcagcaccagcccggataacagcacttccagcagactggaagcctgaataatgcggttgcgcagggaggtacgccagtggctttctaccgggtgagagggatgttccatagtaagaccttcctttcggcattctgctgcataaagatcgacaaaatcctgcctttattgtagcagacgagagaaggtctgtcaatttcaatccacgatggtgacggtggtctgcgggccgacggccacatagccggactttttgatgcagtcctgcccggcgtcggtatccagccagtcgtacagacggcgctccgggctgtcggcggcggcatctgggtggatgacggcgtagaaatcgttgcacagggggtagctgccgtcggcaagagtgtcgttgctgggggtcacaccgtccaccgccagcagccgcagcccgggcttggaatacatctggtcgatgtagtaatacacggagaaaccgatggcgttggcgctgttgttgtaatcggcaatgctgtccaccagctcgcccatggcggcaggtgccagctcagagggtggggtcatcaactctccgccctgaatgagcagctttttgaacagggtctggctgccggagtcctcgccgcgctggaaggcaacgatttcctgatccttgccgcctacatccttccagttggtgatcttcccggcgtagatgtcccgcagctgctgctggctaagcgcctgcaccgggttgtcctcgttgacgatgaacaccagcgcgtccaccccgatgggtttctgctccagctccacattggccttttgcagctcttcctttacatagtccggcgcttcgtacaccaccagcatccgggtggtggtgtcgtacaggccaaagttttcccatgcgtaggcggtggtgcttaccgtaatgctgctgcgggcttcctccaagtccatgccggtggtatcggccagcatctgcgccatcagcggaatgcaggcggtgctgccgtccagcgggggaaactccgcttcggtcaggaacggctcaggctgctgcacagtcgaggacgctgcagaggacgcgggcggctctgcggcagaggaagcggtgctgccggagggcgcatccgtgcccttgcaggcggtcagcaccccggcggcggagcaggcagctagccccagcagaaaactgcggcgggaaattttagcgtttttcataagaaagccctcctaactcaatagccataactcggtacatcgtccgcagtggcagacgagaaaatgctctggcagtacagccagttgccgctcgtgtccatccagcccacatagaagccccgctgtgcggcaaacacatggtcgggcagggcattcagactgttggaatagtacccggtgcagctggaaagtccctgcagcaccaccttgccgtctgcattcagcacatcgcatacgctgccgtaggcgctgcccgcagcggcgcggctgccgtagaacatgggtctgccgtcggggtcggtggtcaggtagttgacgtaactgtacttgccctgcagggcggtcaggtcgctgacaagcccctgcgggccgtacagccgggtggcggtggtctcgtagcggtcgttatcctgcaattccagccagacgtagccggtgccgcagttgctcatccgtactcgctgctggtgctccaccggttctacggtggtgtcggtcagcagcttgccgttgtccttactgtacacccgcagactgccgtccagcgcgtagacggctacggtgttgtcggtggcgtccacatcgtacagcggggtctttgcgcctgtctccaaatcatagagttcgtagccatggccctcgccgctgtgccatgttaccacatagcccgggaaatactggctgggctgctcgtcaaaggtggagatcagtccgcggtcctctgtggtcatgtcccgcagttcgtaccggccgtcactggtggaaaagctggcaagaccacccggatagacctgcaaaaagcccgtgtactgctcgccggtctgggtgttgtacaggatttggtcggtggtttcctctccggtggcaacgtccagcttcacccagtcgctcagggtgtcgctgtcgtagaaaaggcggtatgccgaggcggcctcggcgcggtagacgggggtgccgtccttctcctgcaccaccacccagcggttctgctggtagtcggtatcccagtcgtaatcgtccagtccctccgggcgggcgtagcagctgaacaccagcttatcgccgcatagggtgcagctgtatgcaccttccggtaccggcagcgctgcgccggtggcaaggtcgatgacctgacaggtgccataaccggactccgggacgtatccgccatcgatcaggcggctctcctgcagcaccagcaggccgttttgcagggtggcgctctgctcgccctcaaaggacattacttcggtgccggtcttgtcgtacagggcggtgcggcgtccgccccggccggtggggtcggaccaactgcgcagccagtagtctgcggtgccggtgacactgtcctccaccagcgagacgttctcactgcgggtagactggtgcagcggggtgctgccgcacaggatggtggtgctgcttccggaacggctgtcgcagtacagcacccgcaaacggctatcgttcagcacggcagggtcgtacaggggtttgccgttgtcgtccgtaggtaccgaaaccgcagagcttgcagcgcccggcacgccggtggcgggcggcagcagggtacagccgcagcctaaagtaagggcaagggcagtgcagactgccccgcagccgatacgcaagacaacacgcttcataaaaaccactcctttgcaaaaaacagggaggaaattttttccgttcactcagaatacgaaacagccgcatttttcattgcagaacttgcagaaaaatgcggctaaaaacggttacaattgcattacagctgcgccggggcatgggacgcttctgccttgtccatctgctccagctgccgcagaaaggccagcaaaaagggtagagaaatgaagcaggtgagcgtatccgcaatgggctggcaaagctccacgcccacaagccccagcacccggggaagtacaagaatcaacgggataaagcacacgccctgccggcagcaggccagaaaggtggcacgcccggccttgcccacgctctggaaggtcatgttggtcaccacgatcaccggctgcagaaggatggcaaagcactggtagcggaaggcgggcagcgccacagcggtgaccgccgggtcatcccggaacaggcggatcaggttttcatcgttccaccagcacaccgcgatcagcaccaccagcagcgcaaaggcggctttcagggtaaagacggcggcctgccgcactcggtggtatttgcgggcgccgtagttgaaggacgccaccggctgcaagccctgtcccacgccgatggccactgagaggatgaacataaaaatgcgggacacaatgctcatgcccgccacggcggcatcgccgtagctgcgggcggcaatgttcagcagcatcccgccgatgctgttcagcccctgacggccaaagctgggcgcgccgcctgcaaggatctgcaaaaactcgcgcggctcccgggtgacggcagaaagccggaactggctgaccgttttgccccgcaggaacatatacagcagaatgccaaagctgatggtctgactgagggcagtggcgatcccggcaccggcagtgcccagccctaaagcgaacatgaacagcgggtccagtgcaatgttcagcagtccgccggtgaccagcccgaccatggcaaggtttgctttgccctcataccgcaggatgttgttcatcaccagactggagatcatcagcggtgcggcaagcaggatgggccgggcgtaggcgcaggcgtggggcagaatggttttggtactgcccagcagcatcataaagtccggcagggtggcaaggccgaccaccgccagcactacgccaaaggccagcgccgtaaaaaagctggtggaagcaaagcgggtggcggcgtgggtatcctgactgcccaagcggcggctgatgatggtgccggagccgtgccccagcataaagcccagcgcctgaatgatggccatcaggctggaaacgacacccaccgcgccggaagcgctggtggagatgcgccctacaaaaaaggtatcggccagattgtagatgctggtgatcagcatactcaaaatcgtgggcgcggcaaggctgaggatcagccgggggatcggagtctcggtcattttatgatactgcaccgcagtgcggtcctgctgggtcatgggaaaatatcctccttcaaaaacgagaaagccgccccttccagagcggcagatagtcctgatgaaaacagtataacgcagttgcgacaaaatgtcgagagggagtaaaaacggcctttcgcccctgcgaaggggcgaaaaagcaggcgaaaacaggatggattctatataaagtgctaaagaattgtcgaattacttgtgaaaaatcacgatatgtggtattctttataagaaggaattggaaaaatctgtgcattttatgattgggagggatttgtacatgaaatccgtagcacaaactgtgatcgaggccgaccgcttttataccattgccgctcacaccggcaatgtcattcaggcagtggagggcagcaaggacggcggcactgtccgtctgggtaagtacgaccacaagcccgaacaggagtggagctttgtccgcgagggcgatggcgtgtaccgcatccgcaaccgcgcctccggcaagctgctggatctgaccatgaccggcaccgccaatggcacatggctgcacctgtgggaggacgtgggcggcacgtcccagatgtggaaggtggagcacaccccggagggcaccgtgcgtctgcgctcttcttgggcaggcggcaagtgcgtggacaccgtgggcatcggtgccgaggtgggcgctgtgctgcagatctggcaggaggtgcccggcggtggtgaccagctgtgggtcatctctgaggtaaaggaccgcgtaaagcgtgccgccaaggttgaacaagcagcacccgctgccgagacgaaggccgcaccggccaaggaagccgctcccgccaagaagcccgcagcccgcaagccccgcaccgccaagaaggtggaggagaagcccgctacgcccgccgcaaaggctgcagagccggtcaaggcagaaaagcccgctgcaaagaaggctgctaaggcaaaggctgagcctgctgctcccgcagtagaggtgaaggcagctcccgccgtggcaaccaaggccgagcctgttactaaggctgaaccggctaccaaggcagcgcccgctgcggaaaccaagactgcccccgttgccgcaaagcccaaggcaaagcgtgcaccctgcaaaaagaccgtaaagaagtaagaaatcataaaaagcaaaaaatcggacagaccgcggtctgtccgatttttgctttttaaaatggttcgactttacgcggcaggagaggcggcagcatcatcgctctgggcagcggtctgcacgaactgcacgatgctctcgatggttttgcgcagctgcacaaggctttccacgtcagagtcctgcatccgggaagtaggggcggtcaccacggtctgcgcagcagttaccgtgccggtcaattccgcatggatatggtgggcgggcacgtccagcaggatgtgcaccttgggggacagggtcttgagcagaccctgcttttcgatgcccagaatcagctgcggcgcatcctccccggcggcgaggttcggcagctgaaggtagaggtaaccttctttcgcgttggcgggctgcacggttttgagctgtttcaagtccagctgaaagtcgttcacctgctgcaagccggtggcggcggggtctacccccagcagggtggccagctggtcttgggagatgtagctgcccagcgaccagcccggcagcagcaggcttgccagcggatactcggccacgaccgtgctgcgcagcttgttgtacagctgcccggcgtcgtaaagggtctcttcctcgctgatgtacatccgggtcagaggggcatcgttgacggtgctggtgcccgtcgggtacagcgccagctgcactgcccggggggtgtactggccggtcaggctgccggtggtgccgccgaacttgtccagcagggcgtaaagagcagggggctcggcctcggtggaggtgatggtgtagtccagcgcaaagctggcaccgctctggaatgccttgaccttgcggctgacgaagctgtatagcactgccgcagccaccgcgcacaccagaaccagacacagcagaacgatcagcgccgcacgcagaccggtgcgctttttgtgggaagatgccatgggaaacctctccttccggtaaaacgtatttgcttcagcataacggaactgcacgcaaatgtcaagcgccgcaaactgcggacaaaacaaaaaacctgaaacatttctgtttcaggtttctggcggaaagatggggattcgaaccccagaacgcttttgacacgttacacgatttccagtcgtgcgccttagaccaactcagccatctttccacatcttttattctgcctttgggcgggtgcccttggcgctccactataatacctgaaagcaggctttttgtcaaggatttttttgaaaaaaatcagacttttttaaaaatgacgaaaaaacgcgagaaagtattctgccgcatggatggaaagcacaaaaagcccttgacgcacctttaaaataggtctatattgagggcaaagagcactgcggtgggtcattttgtgccgcagcggcgggaaatataaggaggatgcttttatgacttattctgaagtgcttgccaatgcccgtacctgcattggtcaatactgcaaggcctgcccggtgtgcaacggcgtggcctgtaaaaaccagatccccggcccgggtgccaagggcgtgggcgataccgctatccgcaattataataagtgggccgatatccgggtgaacatggacaccctgtgccccggcggtgcaccggacaccacgctggagctgttcggcaaaagcttccgctatcccttctttgcgggccctgtgggcgcggtgaacctgcactactccgatacctacaccgacatgacctataacgatgtactggtgcgcgcctgtgcggaaaacggcattgctgcctttacaggcgacggcaccaaccccaccgtgatggagatggccacccgcgccattggcgctgcgggcggctgcggcgtgcccaccatcaagccgtggaacatcgacaccatccgcgagaaaatggcacaggccaaggccagcggctgctttgccgtggccatggatgtggacgcagcgggtctgcctttcctgaagaacatgaccccgcccgccggcagcaagagtgtggaggagctgaccgagatcgtgcagttggcggagcgccccttcatcgtcaagggcgtgatgaccgttaagggcgcactgaaggcgaagcaggccggtgccgctgccatcgtggtgtccaaccacggcggccgtgtgctggatcagtgccctgccaccgccgaggtgctgccggagatcgccgcagccctcaagggcaccggcgtgaaggtgctggtggacggcggcatccgcaccggtgtggatgtgttcaaggcgctggcactgggcgcagacggcgttctgatctgccgccccttcgtgactgctgtctacggcggcggcgcagagggcgtgaagtgctacatcgataagctggccggggagctggccgacaccatgcagatgtgcggtgcccatacgctggcggagatcaccccggatatggtgcgggtctgagcgttctattataagtaacaaaaaaggagatgccctgcagggcatctccttttttgttacttcaaggtgccgtccagcacctgctggtaataccacggcttcggggcgtggaaggtcttgccgctgagaaaggcaaagtccggctgggtgaagcggggcatggtcagctcccatgcgcacagtgcctgatacttcagcttcagctcccggttggcgctgttgttgccgtacttgctgtcgccaaggatggggcagccgatgcttgccatgtgggcgcggatctggtgggtgcggccggtgatcagctgcaccttcagcagggccagacggccggagacggcgatggtctcgtaccgggtctccacctccttggcaccgggctgcttgtcctccacgatcttcacgatgccgcggtcagcatccttcagcagatagccgcccaaggtggcgtccggcggcatgggacggccaaaggtgacgcagaggtaggtcttttgcacctcacggttcttgatggcagaaaggaacagctcctcagcctccggggtcttggcaatgatcacaaggccgctggtgccggtgtccagccggtggcacaaggcgggggtgtacaggtcgttctccttgtactcgccctgcttgttcaggtacagcagcgcacggttcagcagagtatcgtcctccggaccgtccaccgcaacgccggcgggcttgtttacaattaaaatctgcgggcagtcgtacaccacctgcgccggggtgcgggcgttcttccacgcggggccttccacccggcggtcggcgtccagcacatcgtccagaatgaacagcttgatctcatcgcccgccatcacgcgggtggaaagcggctgctttttgccgttcagcttgatcttgttttcccgcagcgccttgttcaggcggccgggggtcagggcggggtactgctgggtcagataattgtccagccgggtgggggcaagacattttacttttaaaattttcacgggaaattcctctctatcttaaaatcagtcgcaatagaatgggttcttgattcgtttttattgtagcggaacggaaacgttccgtcaagcaagagaaagaaggttttcgtatgagatggaaccataaaatagtgacacttactgtgcttttggctattggaataacaatggtgggctgtggggcgtccagttccacggctggaagcacagcggcttccgcggcaagcacgacatcttcggaggcgcaaaaaacggaagtacacccaatgcaaggtgttttactgagtgacccactttcggatggcacttatcacatcagctttgaaagcgataaagtatgggtcggtgaacgcaagaataccatcaacaatgctgttgtatacgactatgaccggtacacagccgcagatattgaagcattgagcgaaggagataccattataacacatctaaacgggacagaggaaattacagccctaacagtggaaagcgttgagagagaaaacaactatgtgaccatcaacggtggaatagaagaaggtggtattgacttatgcaaagaggatgaccactaccggactctgacatgggatgattttcccgcttattatgaagttggagtggttaagcaacttgttatggcagacgatatcgaactatcggacggtgcagcagactttgaagccgacccagtgatcgtaaagggagatcgggcggtttgtgatgcaatgagcaatgaagaagatgcttatgggtggaatgcaggaaacacgaccgtgaccatccaaaacggcgagataacccgtgcagaccgcatctgggtgccgtaaattttgctcaaaaccgttgacaaacgttttgcatatgctataatttagctgtacgcaaagcggcgcttcgcctgccttgcggaatgtaaaattatgacagatggcaatgatggggtcagaaatgcacacaccaccgtccagagagagcgcccacggctgtaaggtgctccggttgggatcatttcgcgccaccccggagcttccggtgaatataaaccggacgctgcgcagcgttaatgcgccgaaagcggcaggggacaagtgatcctttgcaatttgggtggtaccacggagtttgatgcacaagcagccttcgtcccttttgggatgagggctgttttttgttttttcaccgtgccgcccctctgccataacagcataaaaaacggcgcctgagcgccaaagacgattgaggagagaaagatctatgcaatggaccggtttgaatgaactgcgcgaaaagtacctgagcttctttgaaagcaagggtcatctgcgtctggacagcttccccctggtacccaagaacgaccccagcctgctgctgatcaacagcggcatggcccccatgaagaagtggttcctggcacaggaggagccgccccgtcatcgcgtgaccacctgccagaagtgcatccgcaccccggatatcgagcgcgtgggcatcactgcccgccacggcaccttctttgagatgctgggcaacttctccttccaggattacttcaaggacgaggtcatcccttgggcttgggagttcctgaccagcgatgagtggatggctatccctaaggatcgtctgcacatctctgtgtacgaggaggacgacgaggcctacgatatctggactaagaaggttggcatcgccccggaccacatggtgcgtctgggcaaggaggacaacttctgggagcacggctccggcccgtgcggcccctgctccgagatctactttgaccgcggccccgagtacggctgcggcaagccgacctgcggcgtgggctgcgactgcgaccgctatatggaaatctggaacctcgtgttcagccagttcgacgccgacggcaagggccactacgagcgtctggcacgccccaacattgataccggcatgggcttggagcgtctggcctgcgtgatgcagaacgtgggcaacctgttcgaggtggataccgtgcagagcgtgctgcaccatgtggagcacattgcaggcaagacctacaagcaggaccccaagaccgatatttccatccgcgtcatcaccgaccatatccgcagctgcacctttatggtgtctgacggcatcctgccctccaacgagggccgcggctatgtgctgcgccgtctgctgcgccgtgccgcccgccatggccggatgctgggcatcgaccaccccttcctcgtggatctggtggagaccgtcatccagtccagcgagtccgcctaccccgagctgcgcgagcatgacgcctatatcaagaaggtcatcggcaccgaggaggcaaactttgcccgcaccatcgatgccggcatgaacatcctgaacaacatgatcgaccgtctggagaaggcacaccagaagctgctgagcggcatggacgccttcaagctgaacgataccttcggcttcccgctggatctgaccaaggagatcgccgccgagcagggtctggagatcgacgaggacggcttccacgcagagatgaagaagcagaaggagcgtgcccgcgctgagcgcctgaagaagaacatctccggctggagcgaggatctgttcggcgcactggaggctgagcccaccgtctttaccggttacgacaccctgaccgacaagggcaccgttgtggcgctgagcgatgaagagaccctgaccgatgccattgccaccgatgaggaggcaaaggacggcgtgctggtggtgctggataagacccccttctacgcagagatgggcggtcaggctgccgaccacggcgtgctgaacggtgccgagtgcagcctgcgtgtgctggacgtgaaaaagacccccaagggctactacgtccacacctgcgtgctggaaagcggcattgtgaaggtgggcgatgtgctgaccgcacaggtggacaagggctaccgcatggccattgcccgcaaccacaccgctacccacctgctgcaggctgccctgcgtgaggtgctgggcgaccatgtgcatcaggctggttcctatcaggatgcctccatcacccatttcgactttacccacttcagcgccgtgacccccgaggaactggcacgggtgcagaagatcgtcaacgataagatctttgactccatgaacgtcaccgtgcaggagatgccggtggaggaagccaagaagctgggcgcaatggctctgtttggcgaaaagtacggcaaggtggtccgcgtggtggatatcgagggctggtctaccgagttctgcggcggcacccatgtcaagaacaccgcccagatcggcggcttcaagatcgtcagcgagtcctctgtggctgccggcatccgccgtatcgaggctgtcaccggccgcaacctgctgatccgtgcaaacctgcaggaggctatgctgcatgatgtggcaaacaccctgaaggccaacaacgtggctgctctgcccgcccgcgccgaggctgtgatggctgagaacaaggccatgagccgcgagctggaggagatgaaggccaagatcgccgcctccaaggtggacagcctgttcgacaatgccgaggaagcagacggcgtgaagatcgcctctgcatactttaccggtaccaccggcgacaccctgcgcggcatgtgcgacagcatccgcgacaaggccgtgaaccccgtggtggctgttctggtgggcaaggctgaggataagatcaccatggctgttaccgtgaataagctggcacaggaaaagggcctcaaggccggtgtgctggtcaaggagttgtccgctattgccggcggcaagggcggcggcaagccggactttgcaatggccggtctgaaggacgagaccaagatcgacgaggcactggctgctgtgagcgccatcgtcaagaaggctctgggctaaaaaggatccatgtccccgcccggtgccggatgcgcgccggggcggcgggcttttgtagaagcaggaaggagtgttcccccatggaagattgtctgttttgcatgatcgcagagggcaagatcccctctaaaaagctgtacgaggatgaccaggtagtggcattctacgacatcaacccgcaggcaaaggtgcatttccttgtggttccccgcaagcacatctcctctgccgctgtgctgaccgaggaggatggtgctctgctgggtcacatcttcgccgtcatcgcaaagctggccaaggagcagggactggaaaacggttaccgcatcatctctaacgtgggcgaggacgcaggccagaccgtgaagcatctgcatttccatgttctgggcggcgaaaaactgcctgtctgattccaatacgaaagggagattttgattatggctgaaacttataccctgcacgtcgcaggcctgacccgtgagttgaccatctgcaaggtgaacgaccacatggacattgccgcattcatcatgctgggtgatgccgagctgaccgtggccgctgctgcggagctgctgaaaaagtgcccggattttgatatcctgctcaccgccgaggccaagggcatcccgctggcacacgagatgagccgtcagagcggcaagccctacatctgcgcccgcaagggtgtcaagctgtatatgccggaccccgtggtggtggaggaccagtccattaccactgccggtaagcagaagttggtcatcgaccgcaaggagctggaaaagatgaacggcaagcgggtgctggtggtggacgatgtcatctccaccggcggctctctgaaggcactggacgcgctggcagaaaagacccagtgcactatcgtgggtcaggccgctgttctggccgagggcgatgcttctgagcgcaaggatatcatcttccttgagccgctgcccctgttcttccactaagccgggatgcgccgcctgctctgcgctttctgcgccggaatgatgggccttagtttcctgtggacttttttgccgcaaacggagttttttatgccgtttgcggcattttttgttgcctttttgctgctgctttgcatcccggatggcagccgtaagctggcgctctgtctgctgctgggcgcgctggccgggctttgcgcggtgcataccacgagcgcccggctggagcgtgcccgggcaaattacgccgggcgtaccgtgctgctgactgctgaggtggagcgcgcggacagtaactatttttcggacacagtggacgcgaccctgtgggtggaaagtgtgaacggcagcccggcgagcttccgcatcacctgtgcggagctgcccgcctgcacggcagggcagcgggtgcagggctggtttgcgctgcaacaaccggacatggaagaacagacggcgcagtacgcagacggcatcgccttgcaggccgagcccttggcagaaaagccgcagctcaccgtactgggcgagagcggcagcttccgtgcctgcacccaccgcttgcagcaaaaactgagcgagagcctgcgccgtgccatgcaccgggacaccggcggtgtgctggtggctatgacggtgggcgaccgcagcgggctttcggcgcagctgcgcagcgcctaccggggcgcagggctttcccatgtgctggtggtcagcggcatgcacatttccatcctgtgcggggacatttttactgccctgcacccccgcggctgggagcagagttaccgcagacgcagacggcgtgcagtgggcaaaagcctgctggcactagtgctgatgggcgtgaccggctttacaccttcagtgtgccgcgccgccgtggcggtgtgggtcagcgccttgggcgtgtgggtgtggggaccgccggacgctcttacctcgctggcggcggcaggcatcctgatgaccgcagtcaacagctacgcggtgtgggatatcggctttgaactttcctttgcggcagtggtgggcacggtggcaggcaacgcctgtatccgccggatacgggacacccgcgacaggcgcttctgggtcaaagcgggggaaaatctgcaaaagccggtcagacgtccgtggtacagcaaattgccgaagggggtgcaaggtcttgcagagagcgcctgtattgccgcctgcgcctcggcggctaccttcccggtgctggtgctgcggggcctgagcgtcagcgcgtgggcggtggtctccagcatcgcggtgctgtggatggtgcagccgctgcttctgttggggttggcagtagcctttgtgggactggtgccgtggctggcaccggtgcatggggtactttcccgggcggcagacctgctcacagggctattgaacggctgggcggtctggctcagcacaaagcccggggcatccatttactttaataccgcctacgcagcgctggtctgtctgctgctgtgcgggctttgggtgctggctttccgctggcgggtgcgtctgcgggtggcgctgccgggcattctgctggcggcagcggtgggcatcgggctgggcaatgccctcagccgggacgtggtgcacatcgaccttgtgggcagcgcacaggcgcctgcggtggtaattgcccagaacgaccgggcagtggtactgttccggggcggcagcgccgcccagcgtgcggtggaaaaccagctagcgcggcggggcgtgcgcactgtggaactggtggtagacctgcgcatgaatgcaaaaaccgcctgcaccctgcccgcgcagcagggcatccgagcagagcgtctgccggtcaataccagccgtaagctgcgctgcaccccggcggcggtggaactgctgcgcacccgggaagggtgtcttgtgcggctgagcatcggcaaccggcagtttgtgaccctgaacggaaaggcagagctggcgcagtcgttgcagacagagtggctgatcgccacgccgaaaaagccggagacagtgcagtaccaaaaactgctggcgctgcgcagttacagttggatgacgccggaaacgcagtacactgcctccctcagcctgcgccgcaccggcggtgaaagctaaggtgtatctgaaaacaaagaaaatgacgaatatttcgcaagcacaagcgggatttaaggcaaatagccgcaggaatcctttgtggatttcaaggctgtttaacgcaaaatccagctgtgcttgtagaaataggctaaattttcgacttttcagatacaccctggggtaatgctttgcaatccgggtcgagtgtggtacaatataaggagcattttataacaggaaaggggcatttgcatggccacggaagcaaaactccggcagctggccgacaagggctgcccggtctactatttttattccagcgagcggtatctggtgcggcaggcagtggcggcggcggtgcggatgctgtcggcagacagcgacgaagacgccaccatcctggacggcgctgcgccggaactggaacagcttatcatggcagcgggtaccatctcattttttggtacccgacgcgtggtggtgctgccggaaatagaccccgctgcctacggcagcaaggacctggacgagctgtgcagcactcttgccagcttggaaaacgccgtggcagtgctgggtagcgtattcccgttggaacgcggtaagctcaagctgggcaagcaggcgcaaaagctgcaagccaagtgcaaggccatcggctacacggaagagctggcaaagccccgcccctttgaactgaaaaatctgatgatggagcgcgcaaaggcgcagggcgcaaccctgccggacggcgcagccaccgcattgctggagcgctgcggcgaggacccctttctactggaaaacgaggtggacaagctttgcgccctgtccggctaccagactgtgagcgcatccatggtggcggagatgggcacggtgagccttgaagcggacgtgttcgagatgatccgcatgatcaccgccaaaaacgccaccggagcctgcaaaaagctgcagaccctgctgcggctgcagcaggagcccatcgcaattacagcggcgatgatcggcagctatgtggacctgtaccgggtaaagcttggggcggcaaaacggaaaaattacagtgcagtgcacaaggattttggctataagggcagtgactaccggctgaagcgttcggcagaaactgccgcccactacaccctgccccagctggaggcctgcttgcaggtgctgctggagctggaccagagcctgaaaagccagcctgtggcggcgcagacactgctggaaacagcattgtgccgtctggcgctggcggggagcggaagatgatgcaaaacgagatgatccataccgaccgggtgctgatcgtggagggcaaatacgatgccgtccgtctggcgcacctgaccgatgccatgatcctgctgacggatggttttggcatttataaagacaaacagcgccagcagctgttccgggcgttggcgcagaaaaatggtctgatcttacttacagattcggacgcggcaggcttccgcatccgcaactacatcaccaatatggtgggcgcagagaacgtggtgcaggcctatgtgcccgccatccacggcaaggaaaagcgcaaggcgcagcccggcaaggaggggctgctgggggtagagggcgtggacgacgcccttgtgcggcaggcgctgctggacgccttgggcgcagaagccggagccgcgccggtgcgcccggcgggacggcagatcacctacaccgacctgtacgagtgggggctttccggcaagcccggcagcgccgagcgcaaggctagactcttgaatgcgctggggctgccgccgcgcctttccaaaaaggaactggtggaggcattcaaccgcctgtacacttttgaacaactggacgaattgcagttgaaaattttgcaggagtgaaaaactaactgtttttgccccacgcctgccgcagcagttccagcgcgtgggtttccagccgggaaacgtagctgcggctgatgcccagcagcccggcggtctccagctgggtcaggggcggctgccctgccagcccgtaccgcagcagtaagatctgccgctcccgggcgggcagggtgtccagcagctgccgcagccgccggacatcctcctgccgctcacagctgtcctccatgcaaaagccgtcctgtatcacgtccgctaaggtcagcgccgagtccccgtctgcctccaaggcttcttgcagggaaacggtctgcccgctcttgcgctcccgccggaactgcatacggatctcgttttcaatgcagcggcttgcataagtggaaaaccgcgccttgcgtgtggcatcaaaggtatctaccgctttcatcagcccgatggtgccgatggaaacaagatcctcttgatcacccggcagggcgtaatatttttttacgatatgcgccaccagccgcagattgtgccggatcagcttttcccgggcggcggcatccccggcgcgcagggtgctgaaagcggcggcttcttcccgggctgtgagcggacgcggaaagcagccgctttcaagatggagcgccagaaacagaaattttgtggcgaaaaattgcagtaaggtcagcagcacacgatatccctcccggtacatagttgttagattgtatgagccggggcgcggatagttgccggagaagccttttgtgcgcggtatcttttccgcaggaggaaaaagcgtggtatactggggggataactcggaatttagaggtgtaagatggaatataaagaatatggatcaaagaataatgatattataattttattacacggtggaggtctttcttggtggaattatatagatgaaatatccttgcttgaaaatgaatttcacatagttattcctatattagatggacattcaggaagtgatacaaattttacttctattgaaagcaatgctctagaaataataaattttataaataaaaattataatggaaaagtaaaactaattggagggttatcattaggcggacaaattttattagaaatattatctaaaaatcctaatatatgtgaatgtgctattattgaaagtgctttggtaatgccaatggactttacctataaaatgatagagccaatatttaatttatcatattgtttgataagtaaaaagtggttttcaaaactacaatttaaaagtttgaaacttaaaaaaagcttgtttgctctatattatgaagatacttgtaaaattacaaaagataatttaattgcttttatgaagtcaaattctaattatgaagtaaaaaatactttatcgcatactaaagcaaagaccctcgtattagttggaagtaaagaaagacctattatgaaaaaatcagcaactaaaattgttcatttaataccaaatagtgagcttgaagtattacaaggatattatcacggagatattagcataaatcatgcagatgattatgttgaaagagtaaagagattagttcgttaaattcccatttatcgagtgacgaaaacaatacatccttctgcggacaaccccaaaacggttgtccgctttttatacgctgaaatctgaaaaaagacaaaatgccaagcaaaactgaaaaatatctcatccttgcccgttacttttggtagcacaacatgcttttaaatatgtacgtttttcaatttcgactgctgggcatccacctttggtgagaccacgacggccattgagctcgccccggaaggctatactttaataggacgataaacttgattgtcctaaattgaaagattccataagaaaggaggtagaacgaatgcctaaagaaccaaaaatcacagcactctatgagcgtttgtcaagagatgatgatcttgctnnnnnnnnnnnnnnnnnttttaagaacatccgccattttacagatgatggcttttcaggtgtgaatttcaatcgtcccggctttcaatctctaataaaagaggtagaagcaggaaatgtcgaaacgcttattgtgaaggatatgagccgcttaggacgaaattatctgcaagtcggtttttatacggaagttctgttcccacagaaaaacgtccgattccttgcaatcaacaacagcatcgacagcaacaatgcttcagacaatgattttgctccgtttttgaatattatgaacgaatggtatgccaaagacacgagcaataaaatcaaggctgtgttcgatgcccgagagcgggcaagcgtgatactgcgcttgcccgctctttgcccaaaaggacatgagaagtgaccggagaagatgagaggatcgaaatggagatcagaaaacgaaacggggagtctgttccctttcaacaggagaaaattttcaacgccatgaaaaaggcgtttgacggacagggcaaggagatcgggagcagagagatggatgagatcctcgctaccgttctcaacaatctctccgtcacagtgccgctcaccgtagaacgtgtgcaggacgaggtggagcgaacgctcatggagcgcggacactatgaggtggccaaggcgtacatcctctaccgcgaaaagcggtctgcgctgcgccgtgtccggcataccatcgcgcggacggtgggggatgactcgcttgacgaggtgctgcgccgcatccagatggattttaccgaggaagtctactccctcgcggcgcttcaaatgaagtttgagagtttctgtcgtctgggtatgacggaggatgagcgggctgaggcactgaccaaggcggcggtagagctgactacggcagaggcacccaagtgggagttcatcgcggcttccacttgagatgaccgaggatgaaaaagaacaatttcgcatacaggttatttcaaatcagtatgcagaacggttgctaagtgaagccgaaaagacagaaacgtatagaggtttatcaaaaattgatattctccatacagtttctatccctcaactggctagaacaatcccacttaaaggtttgaatctcagtttagaaaaatacagaatgccggatggtgtaataatagaggttgagagttcgtcacattatttggggtcatttagtgagaaaaatgattcttccacaaattggatagaaaagatcatggagggtgtcggtattcactagatggattctcaagaagcatagccgggcgggtcttatttttcccatctcggatgtttttcaggttgttgcacagggcggttcccaccatgcccttggcacctgtgactagaatgttcatcctatcacctctttaatgtactgcggtgcagtccggaatatctgcgccatccggcacagttgcgttattgcagatggtgcagttgctgccgatgcgggtaaagttgcccacagtcgcaccagtgcgaatgacgctgttggtgtaaatcagggcgtagtcccctaccgctgcatcacagtggacttctgttccggcatttaacagaacgccgttaccaacagatgcaccattctggacacaggcattttgtagcaccacgcagccacagcccaactttgcgtacggactaatgtaggcgctgggcgcaacgatattgggaaaagcaaagccaaggactttcgccttctcatacacctgtgcccggaaccgattgttgccgatacccaccaccagcaagccgtactccttccgcagctccggcaaatcagcaagactgccaaccaccggaatgccacagatgtcagtgcccacaggttgcccatcgtccacaaaggcacagtcatattggagcatcgcctgctccaccactatgcgcccaaagccgccggcaccaaccagcagcaacttttctttagacattcgggatgcccttcagtgcgttctggacatattcggtggtcaggatcttcttaacagtgccttccacatccagacgggtagtgttcctatgctgtttcaaaccacgtcggcgcacgaagagctgcgcgcgaagatccggagttttgcggaggaggagatcaagccactcgcatttttaatggatcagaacaatgagtttcccgatgaggctgtcaagaagctgggcaagctgggctggatgggcattccctaccccaaggagtacggcggtgccggtcttgatgccctgagctacgccatcgcggtggaggagctggcccgtgtggacggcggcacgggcgtaatcctctccgcccacgtctccctcggctcatggcccattttcgcctatggcaccgaggaacagaagaagaaatatctggttccgctggccaagggcgagaagatcggcgccttcggcctcacggagaccaacgccggatccgacgccggcggcacggagaccacggcgctggataagggggactactacctcctcaacggtttgaatgctgtttgtcatgggcagcggtcggttggcgaattttcttattttagggcttgacttttattagcaggtctttgcagcttctttcacaaaaaagaacaccggagcgtccatagagactccggtgttccgaaataataattttctttcttgtttcgcgccaaaaaggcttagaaccgccgccatgtatccggcataaacagcaccagcatggggaagatctccagacggccggccagcatatcgaagatgagcaccagctttgcggggtctgcaaagcagccgaagttctgcattgggcctgccatttccaagcccgggccgatgttgttcagggtagcagccacggcggtaaagttcgtcaccatatcaaagccgttcaggctgatgaggaagaaggaggccgcaaaaataaagatataggccgcaatgaacacgttggtggtgcggatggtctcgtggttcaacagcttgccgtccatgcgggcgggcgctaccacctgcgggtgcagggcggtcttgagctccttggccagggtcttacccagaatgaggaaacggctcaccttgatgccgccgccggtactgccggcgcaggcgccaatgaacatgagcatgaccaagatctccttggagagggtcggccacaggtcaaaatcgcagctggaaaagccggtggtggtaatgatggagcccacctgaaaagcggcctgccgcagcgcctcgccaaagctgttgtacatactataaatgttggcggtgatgatacccactgccactgcgatgaccacaaagtagccccgcacctcctcgctggcagcagcgcggcggaacttgcgcatgagcagcaggaaataggcgttgaagttgacgccgaacaggatcatgaagatggtcacgacccactggatgtagggcgaaaagctggcaaaactatcgttgcggaacccgaagccgccggtacccgccgtaccaaaggcagtgagcatggcttcgaacagaggcattcggccaatcagcaggaacaccagctccagcatggtaagggcaaagtagatgccgtacaggatcttagcggtggactgtaccttaggcaccagcttatccacctgcgggccggggctttccgccttcatcaggttgacgtgggagccgccggtcagcggcagcagcgagagcagaaacaccagaacacccataccgccgatccagtgggtgaagctgcgccagaacagaataccgttgggcagcccctccacggcgggcaggatactggcaccggtggtggtaaagccggagactgtctcaaacagagcatccacagggttcgggatgcagccggtgagcacaaagggcaccgcgcccatcaccgagatgaacacccagcacagcgaggtggccgcaaagccctcgcgcatgtagaacaccttactgcggggtttgatggtgtgcagggcgtagccgatgccggcgctgacggccgctgtgagcagaaacacacccagcaccatccactcgccatacactaagctggcggcggctggcaacagcagcaacgcgccctcgatcatcagcacatagcccagcagacggaaaacgatcgcataattcatagtccgcctccgtcagtgctccacgatatcgcgcagatcgtgcagaccgtgctccagcgtgaccacgatgacgttgtcgcccacctggatctggtcgccgccgcgggggatcaaaatcttgctaccgcgggtaatgcagcacagcagcaggttctttttcaggtgcagctggctcaggggcacaccggtagcggcgctctcctcgtgcactgtaaactccagcgcctccacgcggtcgtccagtatgcggtacagagtcttgatgttgttgcccgcctcgttttgcagggcgcggacgtactgcacgatgtagtcacaggtcatgtacttggggtagaccacgctgcccagatccagcccggccagaatatcgtcaaattccagacggttgaccttggtcaccagtttgccgttggagtgctttttggcaaacagggtcagcagcacgttctcctcgtcgatgttggtcagcgccacaaaggcttcggtggattccagaccctcggaaagcagaaactcgcggttggagccgtcctcgttcaggatctgtgcgccgggcagctgctcggccagttctacgcagcgggcagcgtcccgctccacgatacgcacccgcacgtggttttccagcagttcctgactgaggtagtaggcaatggcaccgccgcccacgatgagggcgttgcgtaccggctgcaccggcagatgaagctgctggaagaaggcgtgagctttttcctgcgtagcaaggaaagtgacctgatcgcccttttgcagcacaaagttaccgttggggatgatgaccccgccgtcacgctccaccgcgcacaccagaatatcgctcttgagccgggtggggatctcgcggatggctacgccgtccagtgcatcgggcagcgcaaacttgatcagccgcacacggccgtccgcaaaggtatcgatcttgctggcaccggggaaccgtagcagatgagagatctcctttgccgctgccatttccgggttgataatggcggaaatgccgatctgctttttgataaagtccagctcgtggctgtaggacgggttgcgcacgcgggcaatgccgtggcagtggcccgcctttttggcaaacatgcagcaaagcaggttcagttcgtccgagccggtgaccgcaatgaacacgtccgcatcctcaatgcccgcctcagacagggtggtgatggacgagccatttcctacaatgcccagcacgtcgtagctttcggtcaggtgttccacgcgcgctttgttggtgtccaccacagtcacgttgtggccttcctcgctgagctggcgcgccagagccgtaccgaccttgccgccgcccaccagaatgatcttcataacaagtcctttctcctttggcagccccttttcccggggcatacaagtacagcatagtataccatatcccgccgcaaagttctaccgtttgtcccgcaaatacagcgaattgcctaaaaagcggcagtttctttgtgcaggatggcctgttctcagcgtgaaagcgcaaaaagggactgccacacagctttgtgcagcagtccccttgggacgaaacgatttagaatgcccaccgcgtacgctttgggcatcctcagcggaaaaaatattgttataagagcaaggtcggtcagcctgcgggctgcccgaccttgcattttcgcggaaaacagggttctcccctgctgtccggtctcagtaccgctctacgccgtccttggtgacaagggcgtacaccagcggggcttcctccggcttttcagcgccgtacacaaggccgctgcggtactcggctgcggcagcttcaaacttgtccgcagcgccgtagaaggtggcaaggctctcgcccttatggacgtaatcaccgcgctttttgtgcagggtgataccggcggcaaagtccagcgggtcgccttttttctggcggcccgcgcccagcagcacgctggcagaaccgatcttttcggcatcgtttgccacaatgtagccgtcctgctcggccagcagttcgtagctggcggcgggctgtgcaaacaggctgtaatcatccagcacccggatgtcgccgccctgcgcggcaaacatttccttgcacttggcaaaggcagagccgtccgcaatgacagcctcggccatagcgcggcagtgggcggcatcgcccttgcctgccagtaccagcatgttggccgccaattgcaggcacacctcggtcaggtctgccgggccgtggcctttgagcacgtccatgctctccatcacttccagactgttgccgatgttgtgccccagcggggtgtccatatcggtgatcatggcggctacccggcggccatggtgggtgccgatggcgaccatcagctgcgccagctcaatgctctggtccacggtcttcataaaggcgccggtgccggtggtgacgtccagcaggatggcgtccgaaccggaggccagctttttggacatgatgctggacgcaatcagcgggatgcagctgacagtagcggtaacgtcccgcagggcgtacatctttttatctgccacggcaatgccctcgctctggccgatgaccgacagaccgatctggttcacctgtgcaaaaaactcctcctgcgagagggcagtttttgtgccgggcacgctctccatcttgtcgatggtgccgccggtgtggcctaagccccggccgctcattttggcgatcttcaccccgcaggctgccacgatgggcgcaatgaccagcgtggtcttatcgcccacgccgccggtggagtgcttgtccaccttgatgcccggaatgggcgaaaggtctaccatcacaccgctgtgcgccatcacatcagtcagttcggcggtctcctcattggtcatgccgcgcagatacaccgccatcatccatgcagccatctgatagtcggccacttccccgctgacaaagccgttgacaatagcttccagctcttcccgggtgtgggtgccgccatcccgcttttttgcgatcagatcataaatacgcatcgtttcacgctcctgttcttactgtttttgggggcgttttatgcccggatttcctgccatacgctcttgccgtccagcgtggaggcgtccacttccagatattcgcagatggtctgggcgatggtgccgaagcacagcttggtgcccagatccgtccccgccttcacacccttgccgcagaccagatacggcacatactcgcgggtatggtcggtggtcttggtgtaagagggatcacagccgtggtcggcagtgatcatgagcaggtcaccctcccgcattcccgggaggaaatcagccagaaaacggtcgaactcggtagcggcggcagcgtagcctgccacatcgcggcggtggccatagagcatatcaaagtctaccagatttacgaaagcaaggccttcaaaatcccgggtctgcaaggccttggtaaaggcgatgccgttggtgttgccggtggtcttgatcttttcggtcacgccctcgccgtcaaaaatatcgtagatcttgcccacagcgatcacgtccttaccggcatccttcagcagatccagcatggtggcgcggggcggcttcaggctcaggtcgtggcggttggtggtgcggtagaaggtatccgcgctgttgccaaggaaggggcgggcgatcacacggcccacgccgtacttgcccttgagcatttcccgggcaatctcgcagtagcggtacagctcctgcaccggtacaagctcctcgttggcagccacctgaaaaacgctgtcggcgctggtatagacgatgagggcattttcccgcatggcctgctcgccgtagtccttcagcacctgcgtgccggaatagggcttgttgcacagtaccttgtggccggtcttttgctcatactcccggatcagctcctccgggaagccctcggggaaggtgggcagcggctccgggctgaccacaccggcgatttcccagtggccgatggtggtatccttgcccatgctctgctcctgcaggcgggcaaaggcagccgccggggcatccgtcttttcccctgcggtcacgccgtcaatgttgaacaagcccagcttgcgcaggttggggcaattgaaattggggtggttcgcaatggcacccagggtgttggtgcctgcatcgccaaaggcagcggcgtccggctctgcgccgatgccaaagctgtccagcacgatcagaaaaacgcgtttttccataatggtcactccattctccgggcgttccccggaacagtactactttattacccctattataagcaaaaaccccctccgatgcaagaggaagcagtcttgtatgttcttatcagttttcacgttttgcagcagttttcccctgtcagacagcacgcagaaagctgcggcgcatcgttaaaagttttgcaatctttcctttgggcatcaacagatgcaaaaacttgtattcaagcaaaaattcctcttgctctcttgcgccggaatgattataataataggtggtagagttttgggttttcccgctctgccatataaaccgacccgctgtaccgggagcttttactcccattggtcatacacagcagcctgcagggatgctgtgccggatataggtaagagagagttgacggaggtatattgcatgagaaagacgaaaattatttgcacccttggtccttccaccgataaggaaggcgttctgcgcgatctgatcgccaatggcatgaacgtggcccgcttcaatttttcccacggttcccacgaggagcatctgggacgccttgaaaagctgaaggctctgcgcgaggagctgggcaagcccgtggccgcactgctggacaccaagggccccgagatccgcctgaaggacttcaagaacggcgttgagaatctggttgcaggccagacctttaccctgaccacccgcgatgtggagggcaccaacgagatctgctccatcacctacaaggatctgcccatggacgtggagccgaacggcaccatcatgctggacgacggcctgatcaagctgcagatccagaccgtgaacgacaccgacatcgtctgcaccgtactgaacaacggcaagatcaagaacaagaagggcgtcaacgtgcccggcgtgcacctgtctatgccgtatatgagccagcgcgataaggatgacatcatcttcggcatccagcagggctacgatttcatcgccgcttcctttgtgcgcaccgcacaggacgtgtacgatatccgcaacctgctgaaccagtacgattccaacatccgcatcattgcaaagatcgagaaccgcgagggcgtgaacaacatcgacagcattctggctgctgccgacgccgtgatggtggcccgtggtgatctgggcgtggagattgacttcaccgagctgcccggcatccagaagactattatcgaccgctccttctccttcggcaagcccatcgttaccgctacccagatgctggacagcatgatagtgaacccccgccccacccgcgccgagatctcggacgtggcaaacgccatctacgacggtacctctgccattatgctgtccggtgagaccgctgccggtgcctaccctgtggaggcgctcaagaccatgtccgccatcgctgagcgcaccgagcaggagggcttccatctgcgcggccgcacgatggattccaaccccggcaagatcagcgtatccgacgctaccgcccatgccgcctgcctgaccgcacgggacgtgaacgccgctgccatcgtgaccgtgtccgagtccggcaccaccgcccgcctgctgagcaagtatcgcccgcagcagcccatcattgcctgcgtcatgcgcgagcaggtgcagcgtcagctgtccctgagctggggcatcaccccgctgatgatgtctctggcacacagcaccgatgagctgatcgagatgtccactgctctggccaaggaaaatggctacctgcacaacggcgagctggctgttgtgaccgcaggcgtgcccgtgggcgtttccggcaccaccaacatgatcaagatccacatggtgggcaactgtctggctaccggcgtgggcgtcggccccgaaaacaacgatgttgccagcggcaaggcctgcgtctgccgcaccatggacgaggtgcgcgccaagttcaagcccggcatggtgctggtagttccttccaccagcaatgagatgctgagctttgtgcgcgacgctgccgctctggtggtagaggagcccggcctgaacagccacgccgctattgccggcaaggcactgctgaagcccaccgttgtgggtgccgccggtgctaccagccacatccgcgatggtctgatggtggctgtggactgcgcacacggcagtgtgcagcgcctgcagggctgataaaggagagctgtagtatggaacgtatcgcaagtttttgcgtggatcacacccggctggagcgcgggatgtatctgagccgtcaggacggcgatgtgctcacctgggacatccgcatgaaaaagcccaatcaaggcgattacctgaccactgctgccgcccacacgctggagcatctgtttgccacctacgcgcgcaacagcgccgtgaaggatggggtgatctatgttggccccatgggctgtcgcaccggcttttacctgctcacccgagggctgaccccggcacaggcgctgcagctgacggtggacgcctaccgctttatggccgattttgagggcgctgtgcccggtgccagcgaggtggagtgcggcaactaccgcgatatggatctgcccgccgccaaggctgaagcagctgccatgctgcccgtgctggaaagcctgaccgcagaggatctgcactactgatctgtcaatataaagagagcgccgcacaaaataccgtgcagcgcttttttgttacaaaatgatgcgaaagtattatttataatttcagggcaggggaacgtctgcggatgttcccctgccctgtttttactaaaagaaatctcaaatcagccccaaggctgcaaactccttggcaatgccgtcctcgtacaccgagggggcaatgcggtcgcagcgctgcttcaggcttgcagagccgtcggccatacagacactgatgccgaccacatcggtcatctgcaggtcgttgtcgctgtcgccaaagccgatgctgttctgcaggggcacgccgagatagtcacatacggccttgatgccgcgccccttatcaaacttgcggttgatgagctcgccgttcacatagccgccgttcagaccgtccagcttgctctcgcagaacacgaatctgtcctcgtacaggcgcttagcctcgtccaagtcctcgctgcgctctgcgatatatacgatcttatacagcggctcacccttgtactcggccagcgggctcatggtcatgccgtcctccatggccttgcgccagcgggcggcttcgctgttcagggggcctgcatcccggtgggtgaagctccagcgctcgatcatcttcaggctgccgtaggtggcatctcgcgcttccagcgtgcactccacgccgtggcgctccatggcgctgcgcacgccctgtgccagctgcggctccataggcaggtctaccagcaccttatccccgcagaacacataaccgccggcgctgcataccgcgccgtcaaagccatagtccagcagcggctgggtcatgcgcaggttgcgcccggtgcacagaaacagcttgtggccattggcatgtgctttgtgcagcgcttccaccgtgctttgagggatcagcatctcgcccgggggcagcagagtgccatcaatgtctaaaaaaatcagtttttgtttcattcgttcctctttttttacagtgagccgcgctctaccagcgtatagcccagcgtggtctggcgtaccggtgcagcgtccggcccggtatgctctaagctttgcagcagcatccgggcagcctcctgcccgacctgccgctgataaaagcggatggtggtcaggccgggttccaccaccttgcctgcccagttgtctccgatgccggcaaggccgacatcctgccctactttgcgcccggcgtcgcgcagcacccgcaaagcgccaaaggccacggtgtcggtcacgcagaccacaccgtccaactgcgggcagcgtgccagcagctcttccatgcagcggtgcccttcttccatggaaaaggcggcgcagtaagcgcggggcagaccatctgcgtttagtcccacctcccgcagtgcatcctgcacaccctgacggcgggctatgccggtggcggcgtcctgctcgctaccgccgatatacacgatatttttgcggccatgctccagcatcttccgggtcaggtcgcgggcagcagagcggtcgtcgttataaacgcagggcaggtctgcaaaacgctgccccgttaccaccacaggcacacggcagtccttcagcgccttgcacagctgcgggctggaatcatagcccagcaggatgataccggccacatggttgcgctgcagcgctgtaagatattccagctccatctgcccgtccagctcggtgtctgccagcagcatcaggtagcggctggcccccagctcggctgcaatgccgctggtgatctgccccaccgactgggagctgatgctgggcacaatgacccccacctgacgcaccttgccggtgcgcagggtctgcgccgcagtatccgggctgtagccggtcttttccactacggcttgtatcacggcgcgcttctgctcgctgagggggccgccgttcaaatagcggctgaccgcagcgctggaaacgcctgccatctttgcaatatcactgatggtcatgaggttcttttctccgttccctctccggtggtaatgtgtaaacgttttcatgcttattataaatccgtttcatatttcccgcaagaggtgcaatgaccgtttttctgtggggctgcccgctgcttttttggtgattttacacaatccaaacaatcttgctttctgatttaccgccagaattgcgaaaaccgtagcgcttatacaagtcccatgctgatggcgcgtgcgataagtcccagcaccagcgctgccagaataatgccaagtgccaccctgctctcgccgccggtctgctgctttttgctgcgggaggctgtgccgcggctctgctttgtaccggtgctgcggctgcgggcagaggtattctgccgcccggcagtgcttttggtgctgcggacagtctggggattgcggggctttgtgcgggcggcggcttttccctgctgtgcgttctgcgggctgctctggcgcactttaaggggcttgccctcgctgcagcggctcaggtagtcctctgcctcgcggtaatactgtgccagttcgttttccttaaaggcagtaccggcgtagccctcctccagcgcctcaatggcttcgttgaacagcagtgccgcctgtgcgccgtctgctgcaactgccgcgtgagcagcttcgttgcgggcggtgcggatggcgttgcaggcatggcgggcggcagaggggtgcgccgtattgcccagcaagtccagcgggcgggcggcatcggtttccgggtccagcagcacccgcatacacagggtagtgtccagctgctgccagctggtcttgccggtaagatccggcatacggtcgtagtaatccgggctttcctgcttgcgggcagcaatatgctccagcagcgcgtccagactgtgcgccccgggcttgcgctcccagtgccagcgcagcaggcggcggctgatctcatcgcaggcggtcttgatctcaaaagccacctgtaaggcttgttccggcatggtatttcctttctgtgcagcgcacacaaaaggcggagaaggcacgctgccccctccgccgggatgatcttattttacagcacgaactggtagtacacaaaaccgcacagcgcgatggctgcgcacaggatggccgtaataggcggcacccagcggatcagcgcttctgccacgctgtcccggctgtcctcgtactcctcgtacccttcgtcctccacaggcgcgggctgacgcaccggagccggacggcgggcggggatcacgcgggtaccctcgtctgccgcagcagcaccggaaagcggtgcgcggacagaggcatccagcacccgggtaggctccgagacaggctggatggggtcagcctttggctcgtagaccggtgctcccacgacccgggtgggctcttctccgggagccgccggagcagcaggggctgcgcccacgatgcgggtaggctcctccaccgcagcgggcgctgcgggagccgccggggcgctgaggggcatttccatctcgtctgccggggcggcgggctgcaacagggtgttcagcgcgttctgcagcagaatgcggtcacagccgcactccgagcagtaaacggtatcctcctcggtggggtggaaggcaccgcaggcgcagtaccagccgttctcgaacacctgcggctgatacttgagcccggtgcggttcatgcgggcttccagcgccttttgcagctccggggccagacggcggggcgcaggcagacgcacacgcttgatgccgtccaaatgcaccacacgcttgccgttgtacacattgcacagcgaaacatccacgctggtgattgcctttgccgtgatgaacacggcatcgtcctgcccgaacagctcgccgggctttacctgcagatcccggtactcgaacttgtcctcgcacaggatcacaccgtccacgcccttgcacttgaagtggatctccagtgcggtcagggtcacgcgggaaatattcttgaaggtcaggcagacagcgtgctcgccgctgacatcccccttgagcagttccacgcagacgaactgcaccgggctgccgggggtataatagtttgcacgggtctgggcgaccgggttaaaattttcctccacgatgctcgctcctttcctaaaaaaagcttagtcctgctgctccggggcatccggctgtggcacttccggctgggcaggctcggcctgctcggcgggttcggcgcgctcagcggtctgggcaggctctgcgggctgcaccggggcaggctgcacggtctggtcgggctgcgcctgctcaggctttgcatcctcgcaggggggcagagtgccgccggccataatggtgttgaactgctcctcgttgagcttttcgcgctccatcagagccttggccagcgcatggagctggtcgatgtgctcggtcagggtgcggcggcaggtctcgtaagcctcgtcgatgatatcacgggtctcgctgtcgatctcggcagcggtggtctcgctgtaacccttgccctgaccaaaatcacggccaaggaaggtctcctcctgcgaggtgccgtagaccacggggcccagacgctcggagaagccgtagcgggtgatcatctggcgggcgatgttggtggcctgctgcaggtcgttggaagcaccggtggagatgtcctccaagatcagctgctcggccacgcggccgcccaagctggacacgatgtcctcaaacatttcacccttggtcacatagctgcgatccttctcgggcagatacatggtgtagccgccggcctgaccgcgcgggatgatggtgatctcgtgcacgcggggatggtgcttgcagtagaagcctgccacagcgtgaccggcctcgtggtaggcggtgagctttttctcctccggggtgaccacgcggctcttcttttcggggccagccatcaccttcatggaagcttcttcgatgtcctccatggtaatggccttgcggttgcggcgggctgccagcagcgcggcctcgttgacaaggttctcaaggtctgcaccggcaaaaccggcggtgcgctgggcaatgaccttcagggagacgtccggtgcaaggggcttgttgcgggtgtgcaccttcaggatctcttcgcgtcccttgacatccggcagacccacatagacctgacggtcaaagcggccggggcgcagcagcgccttatccagaatgtcggcacggttggtagcggccatgacgatgatgccgtcgttggcttcaaagccgtccatctccaccagcagctggttcagggtctgctcgcgctcatcgtgaccgccgcccagacctgcgccgcgctgacgacccacagcatcgatctcatcaataaagatgatgcagggcatggtctttttggccttgtcgaacaaatcgcgcacgcgggatgcacccacgccgacgtacatctccacaaagtcagagccggagatggagtagaagggcacaccggcttcaccagcacaagcacgggccagcagggtcttaccggtacccggagggcctaccagcagcacgccatgcgggatacgggcacccagcgtattgaacttatccgggctcttgaggaactccacaacttccttgagttcctctttttcctcgtcctcaccggccacatcggcaaaggtagcagtctttttgttctcgtgctcgtcctttaccttggccttgcctacgttcatgatgccgccgccaccggcaccgccgcgcatcatggagaacagcaggaaaccggtgcagcccagcatagccagatagaacaaaatctccatccaggggatggtttccttggcgggtacatagtcgtacaccatgggtgcatcggggttggctgcatcgtattgggcgatgtagtccgacacatggtccacgaacatccgggcgtagggcagcttgtagctgaccgtctcggtgccgtcctcgttcttctttaccccggtgggggcagaggaagaggaggacagcaggccggaaagcagcccgcccgtggactgggtggtgctctgctcggcagcgttgggcagctcctgtgcaccctccttcagggtcatggtgatcacgccggtattcagatccagcgagaatttggtgacctgattgctctcaaaatagtgtaccaccgtggaatatgccatggaagagccgctggcgctgccgccagtgccgcccagcaccgaccacaccatcagcacggctgccagcacaatggcgatcaccagcggattgaaacggggtttcttcggttgcaaaaaaatcaactccagttctggatttttataatggacagattacttcgtgtagacctcgggcttcagcacgccgacatagggcaggttgcggtatttttcatcgtagtccaaaccatagcccaccacgaactcgtccggcacctgaaagccctcgtaatccggctggatgttggccttgcggcggctgggcttatcaaggatggtgcagatcttaacggagttcgggttgcgcatcttgagcatgggcacaaggttggacagggtgacgccggtgtccagaatgtcctccacgatcagcacatccttgccggacagatcaccgtccagatccttgatgatcttgaccagaccgctggtggtggtgttgctgccgccgtagctggagaccaccataaagtcgatattgcaggggatgctcacagcccgcatcagatcggccataaagaccaccgagcccttgaggatggacaccagcaccagatttttaccggcataatcccggctgatctgagcgcccagctctgccaccttggccttcagctgctcttcgctgaccagaacggtcttgatatcatcgtgcatactcatttgttttttcctcctgtgtttcgatctctgcattcaagtgcaggatccatctgctttccgtgtccggtgcaaggccatcggcaaagccttctccacacacccataaaatttcgcttccgctggcaagcagcggcagcgtatcccgcagttcgttcgggacgccggcctcgttcatccactttcgcagcggtttgctcaagccccgccccgcaggccggaagcggtctcccggctgtcgtgcacgcagaacaaggccagtgtacaacgtagttattctagcataatccgcccgattttttaagtcttttttatgaacgacttgtatttttttctcaaaatcggctgttagcagctccgctttccccttccagcccccgcgcagccggaattccggctgtttttcgggcaaaaggggcacttgctgcggcgcgctctccagctgccggggcagcgcgtctggcagcatttcctgccgcagacagccgttcccggcgcaaaaacgcacctgtccggtcagctgtactgcaccgctgccctgccgcaccacggcacacagcagctgcacatatttttcctctgcgtcccgcaccggagctacaaggctgtgcagcgcggtctccagcagcagcgggtctgccgcctgcaaaggcagcagctgccacgccggttctgcaccgggcaggcgtgccgccgccagaagctttgcagccccggcggcaaggtaggcatctgcccgcgcagccttttcacagaaccgtgccagattctgcaccgctgccgcgttggtgcttttcagcgcaggcagggcgctgtggcgcagccggttgcgggcgtaggcatcggtgtcgttggtctcgtcggtgacccacgtctgccccgctgcccgacagacggcctcggtctcggcacggctcaggcaaagcagcggacgcaggtagcacccgcgccttggccggatgccgcccgcaccgtgcagcccggtgccgcgcgccagccgcagcagcagcgtttccgcctgatcatttgcagtatgggccgtggcgatggcatctatcccctgcccttgcagctgcacaaaggccgtgtagcgcagacggcgcgcccagtcctccccggcgtgcgccgggggcggggtcagctctgccgcatggaacacccgcagcggcacgcccaagcgggcgcattccgcccgcacaaaggcctcgtcccggtcggcgctctgcccgcgcagaccgtggttcacatggcaggcagaaagcgtatagccgaacctcggctgcaattgccgcagcaaaagcagcagcgccatgctgtccgcgccgccggagactgccgccgccagatgctgcggtgcgccgggctgcaaaagcccctcccggatgcagaaatcctccacccgggcaagaatcgcggtatccatcagcgtttgaagtccacatccataaagcgggtgtgggcaccatcccagccaagcggcacggtactggtctcgccgtgacggttctttgccacgatgcactcggcggtatcggcatccacctcagcaccgtccgggttctggctggcgtagtaggaatcgcggtacaagaacagaacgcagtctgcgtcctgctcgatagaaccggagtcacgcaggtccgaaagctgcgggcggtggctggagttgttgccctgcttttccaccgcacgggacagctggctcagcgcgatgatgggcacatttagctccttagccatgatcttcaggtttcgggtgatggagctgatctcctgcacacggttctcgctgcgctggccggtggtcatcagctgtaaatagtcgatgacgatcaggcccacgttggggcgggcagggtcctgattcacccggcggatcttggccttcatctcggtgatggtgataccggaggtgtcgtccatatagatcggtgcatcgtgcagcttttcggtagccagcgccagatactcccagtcctcggcgcgcagcgcaccggtacggaaagcctgactgtcgataccggcctccgacgagaggatacggttggtcagctgctccttggtcatttccagactgaagatggccaccggcaccttttgctgcatggccacgcgggtggcgatgttcagtgcaaaactggtcttgcccataccgggacgggctgccagaatgaccagatcaccgcggccaaggccggtaagcacggtgtccagcagacggaaaccggtggggatgcccttgtacttatccgcatccgggccgctgatcttttgcaggttggtcagcgtttccaccatgctggacgaaagcggggtcagggcgctggaatcgcggccggagcggatctcgtagatacgctgctctgcgttttccagcagaagatcggcgtccggctcgtctccggcgtcctgcaagatgtccttggcaacgcccatcagctggcgcaccagatatttttcctgcacgatctgggcgtaggcctttacattggagatgctgggcaccgtttccgccagaccggtcagatagatcttggcctcgtctgcgctggggaacacaccatcggacaccactgcatccagcagggtgacaaaatcgatggtctggtcgttggtgaacaggcgcagcatctcggtccagatctgggcgttctgccgggtgtagaacatttccggcttgaggatctccacaagatcggtcaaagtgtctggcttgagcagcaccgcgcccagcacgctctgctccgcctgcatattgtagggcagattgatgcccacgctctccagattcagttcattggaataacgtcgttcgttcggcatagtagtttgtccttatccaaaatccaaagcatcctgtaaagccaaaaagcgccccctgctgtgagggggcgcaaacggcacacagatcaggcctgttccacttccacctggatcttgaaggaagccacgacgccaacgtacagacggaccttgccgttgaacacgccggcatccttgatgtccttggtctccagctcgatcttctttttgtcgatgggtgcacctgccagcgcagccagtgcctcggcaacttccttgccggtcaccttgccgtgcagacggccggatgcgccgcccttggccttgatggtcacggtcttgccttcgatcttggcagccagagccttggcggctgccacattctcagcttcgtggaaatcggctgcggcctccttgccgcgcgccatgttcacagcgctggcatctgccacagcggccagcttgcgcgggaacaggtagttgcgggcgtagccgtcggagacctcatggatctcgtccttcttgccgatgcccttgatatcctgcttcagaatcactttcatgatagtatccctcacttctcaccggaaaaccggtgcagtcttatggtaatagtatagcgcatttgtcgtttttgggcaagaggaagcggggcagcatttcaaatgtcctccgctgcacccctaccccctcagtcgcctgcggcgacagcacccccaaggggacgcctttttgcggcagcaaaccggagcatttatgctccttatgccagttcctttgcggccacgtccagcgctacctcgatgaccttgtccatatcgtagtacttgtactcgcccagacggccgccgaagatcacacccggctcggcatcggccagtgccttgtactgtgcatacagcgtgccgttcttctcatcgttgacgggatagtagggctcgtcgccctttttccactcggcgctgtactcccggctgatgacggtcttgggctgggtgccgaactcgaagtgtttgtgctcgatgatgcgggtatagggggtctcggcgtcggtgtagttgaccaccgcgttgccctgatagttgtcggtgtccagcacctcggtctcaaagcggacgctgcggtactgcagcgcgcccagacggtagccgaagtaggcatccaccgggccggtgtagatcaccttctcagccagtgtgtccagcgcagccttgtcggccagataatccacgttcagacgcacctcggtaccggccagcatcttttccaccatggcggtgtaaccgccattggggatgccctgatacagggcgttgaagtagttgtcgtcataggtaaagcgcaccggcaggcgcttgatgataaaggcgggcagttcggtgcaggggcgtccccactgcttgccggtgtagcccttgatgagcttttcgtagatatcggtgcccacaaggctgatggcctgctcctcgaggttctgcgggtcggtgatgcctgcagcggccttctgctcttcgatcttggccttggcttcggcaggggtcacaacgccccacatcttgttgaaggtgttcatgttgaagggcaggttgtagatctgaccgtggtagttggccaccgggctgttggtgtagcggttgaactctgcaaactggttcacatactgccacacagccttattgttggtgtggaagatatgcgcaccgtagcggtgcacattgatgccctccacattctcggtgtagatattgcccgcgatatggtcgcgcttatcaacgaccagacactttttgcctgcctttttggcctcgtgggcaaacacggcgccgaacagaccggcaccaacgataagataatcatactgtttcatgttttattccccttttgccggtcgtgcttccggcgtagtctttttctgggagagataatattggtcgatggcgtcctgaatacggctgcgtgccgcctgcggggtgatatgcttcagctgcgctgctgccatggtctgatgaccgccgccgcccagcgactccatgatcacctgcacattcacggcacccatgctgcgggcagagacgttgacgccgttgcccacctgcaccgccacaaagctggcgtccacgccctgaatgcgcagcagatcgttggcagcctgcgcaatggcgacccgggcttccggggccacctcgccgccgatggagatggcacagtttttgtacatctgcgccttttccaccagatcggccttggcgttgtactccaccatggtcacatcgaacaacctgcgcacccgctcggtctctgcgccgtagcggcgcagagcggcagcggcttcaaaggtgcgcacaccggtgtgcagggtaaagtcctgcgtatccagcagaatgccggcaagcagaccttcggcctccacgcggttgggcttgtcgtcccgctcgcccacatactgcagcagctcggtgaccagctcgctggccgaggaggaatagggctcgtggcagaccagcgccgggttttcgatgtagcccacgcccttgcggtggtggtcgatgacggccaccttgccgcatttttccagaatgtccttgctttccacaagacccgcttgatatgtatccaccacgatacacagggtgcgcttagaaatgatgggcagggcgtccttggggtcgatgaagtcatccttctgccccgccttgcacagcgcatcgatcaggctggccgccagcgtagcgtctcgccggacggcgatgaccgccggcacatcgcagatcttacaaatgcgcagcacaccctctgctgcgccgatggcatccagatcgctcatgcggtgacccatgatgaccacatggtcggcctccttgatcagcttgaccagctggtcggccacaaggcggctgcgcaccttactgcgcttttccacgccgtggctcacgccgccatagaaggtaaagccgtccagcgtcatctcagcggcctgatcgccgccgcgtccctgcgccatatccagtgcgtgctcggccatatcctgcgcctcccgcagggtgcgcgcgccgcgtccgataccaatggacattgaaaggctcacactggggtccagtgcgcggatcttatccagcacgtcgtagccgcggttggcgaactgctccagctggcgctcctccaccactgcgatgtagcggccgccgctgcctacccggcgcagaaagccgctgccgcgcccgatcatatcctccagaatgcggttgacgccctccagcaggcgggcgcgctcgctgtccatcagatccccgaacacatcatcgtagccgtccagctggaaggcaagataccccggacggctggccttgtactctgcctcaatgcggcgcaactcggtctcctcgttcagcaccagcagggtcacgctttcggcttcgccgggcacggtggagctgtgcacgctccagtagccgtcggcaagggtcagcagctgtccctcgcgcttgcggcacagctgcagatccagcccgggcagcagcttctgcacccggctggccagcacatcctgcccgcccagcaggcgggtgcggaactggctgttgtaccacagcaccgtctcgccggagagcagcgccgcaggctgggaaaggggctccagactgaactgcaccttggatttttcaaacgtggtgccgcttgtccagcgcaccacccagcggcgcagcttgcagcggaacagggttgcccctatgccccacagcaccaccagcacggccagcagcagccatgccgtggggcgctgcaccagcagtaccagcagcaaaaggccgcacagcaccgccagactggccgtaagcatttccagtgtccatctcggtttacgtttcattggttttttgcctcctcagacgctgcaccgccttgcggtgcgcccggatcagacctccatcaggatcggcaggatcatcgggctgcgtttggtgcgccggtagatatagctgctcagtgcctcacgcacacgggtctttacgctgttccagtcccggacgtgctcgtccacacagcgctccagcgcattttccacaatgctctgggcaccgtccatcaggctctcgttctcgcgcacatacacgaagccccggcttaccagatccggcccggccagcaccttgccggttttgctgtccacggtagccacgatgatgacaagaccgtcctcggagaggtgcttgcggtcccgcagcaccacgttgcccacatcgcccacgccaaggccgtccaccatgacggcaccggcggtcaccggctcgcccagcttcatctcgtcctgcgagaggataacgttggagccgttttccgcaatgaggatgttgctggtgggaatgcccagacttgcagcggtaagggcgtgctttttcagctgcttatactcgccgtgcacaggcaggaagtacttgggcttggtcagggtgagcatcagcttctgctcctcctgacaggcgtggccggaaacgtgcacatcgtacatgctctcgtagatgacctctgcgcccagcagcagcagaccgttgacgatcttggtcacgctcttttcgttgccggggatggggtttgcggagatgatgatgaagtcgccggggcctacccgcacctgacggtggctgcaggaggccatacggctcagcgcgctcaggggctcgccctgactgccggtggtcaccagcactacctgctccggcgggtactggttcagctcgtctacgctgatcagggtgccctccgggatgtgcatatagcccagttcctgcgccatggcggtgttgttgaccatgctgcggccactgaaggccaccttgcggccatcctccacagccagatcaatgatctgctgcacgcggtagatgttggaggcaaaagtcgcaatgataatgcgcttattgcgggcgcgggcaaacaggctgcgcacaccggcggccaccttctgctcggtagcggtaaagcccgggcgctccgcgttggtggagtcgctcagcaaagccagcacaccgcgctgcccgtactcagacagggtggacaggtcggtcacgccgcaggccagcggggtgtaatcaattttaaagtcgccggtctggatgatggtaccggcggggctgtcgatagcaaaagccacagcatccgggatggagtggttcacatggataggctccacggtaaagcagcccagtttgatcttctgacggggcacgatctccacaaacttggtcttgccggcaagtccgaactcctccagcttgttcttgatcaggccgcaggtcaggcgggtgccgtacaccggcaggctgatcttttgcagcagatagggaatgctgccaatgtggtcctcgtggccgtgggtgatgagcagacccttgatcttgtccttgttctgcaccacgaaggtgaagtccgggatgaccatgtctacgccgaacatctcgctgtccgggaacaccaagccgcagtccacgatgatcatatcaccgttgcactcgtagacggtcatgttcttgccgacctcgcccagaccgcccagcgggtagatatggatgggaatcgctgcctccttgggctgctgcgcacggcgcgggcggcggttatagtagggacggcgggtggtgggacgggtacgcttttcccctgcgggagcagtgccgtttgcggcggctgccttgggcgctgccggggcttttgcgcggggtgcggggttattttcctttgtttgagccattctttacctccagattcaattgcaagccaagccgcgtcccgccggggagagcagccgcatcttgcacaggggaagcacctgaaactgcatcggcttccggttgatgcaccgtatagaatttatcgttcagcgcgctttttgcagcaacgctgttggttccgcaagagattcctggccatgtaagtccatctgttcgatgcgactgtggcgtttctgccggaacagccgggcgcacgcctttggtgcacccctatacgcattttgttacgctaagtatagtatctcgcaccggttttgtcaattccaaggtttggcaaaactggaccgacgtatgcattggctcttgacatcccgggcaaaatagcgctaaataaaggtattctattctataaggagaaccccatgaaacaggtagaggtgtacacagacggcgcttgcagcggcaaccccggcccgggcggctggggtgcggtgctgcgctaccgctttgacggcaaggtgtacgaaaaggaactgagcggcggcgacgccagcaccaccaacaaccgcatggagctgacggcctttatcgaggcgctgcgccagctcaaggagccctgcgaggtgcggctgtgctctgacagccagtatgtgatcaacgggctggaaaagggctgggccaagggctggaagcgccggggctggaaaaaagccgacggctcccctgccctgaacccggacttatgggcacaggcactggagcaggaggcacggcacaagatcacctatgtctgggtaaagggccatgcaggccacccggaaaacgaacgctgcgaccagctggccgtagcacaaagcaaagcacatggcgggaggcaaggaacatgagcgacgcatttttgcccggcaacgggttcgacacctacgaaacacaggacaaggtgcttgtcagcatggacggctccgtagattgcggcgttgtggtgcgcattttgcagcagcaaggcttcggcgtggccggggctgtggtgcagctggccgctgaccaaagcgcgtgggccgcagccgcacggcaggctgccgaggctcttggcattgagtgcatcgtgctgaaggcggaggcactggcagaccagcccgccgaggtgctgggcagcggcaacgacgcccggtttgccgccctgctgaccgctgccgacaagctgggcatccagtacattgccaccgggcaccacgcccgggtggagctgggcagcgacggcgtgcacaccgtctgccccgctgtggacgctgcgctggacgagagcgccgcactggcagcgctgccgcaggatacccttgcccggctgctgctgcccttgggcgagtttaccgccgccgatgtgcaggagatggcacaggattttaaagtgaacggaacggtctgagccaaccgctttctacgcaaaaagaagcgccgcatctgtacgatgcagcgcttcttttttacatactttagttctgggggtgcacgatatcgcgccagtccagatctccgcgctcaaggccgtggatcagcacctcggcggtggcgatgttggtggccatggggatgttgtgcacatcgcacaggcgcagcagagtcatctcattcggctcgctgggctttgcattgatggggtcgcggaagaacagcagcaggtcgatctcgttgcaggcaatgcgggacgcgatctgctggtcgccgccctgcaccccggccagaaaacgctgtacctgcaggccggtggcctcggaaatcagtttaccggtagtgccggtcgccaccaatttatgctggctcagaatgcggcagtacgccgtgcagaactgaaccatcagctcctttttggagtcgtgcgcgatcagggcaatcgtcatctgtagatctctcctctattgaaacatttatatataaaacgcttgataaatttcctttgttatacatgatatcacaaacgcaactcatttacaacaggtttttggacacaatattcaaattttcgttcaaattcagcactttgcacgcagctgcgctttactgcgcaagcattgcatcgttgttttcttcctccgtcacccctgcgggcgcggtcgtctgctgcggttctgcggcggctgcatcggtctgtgcatcattcgcagcatccggggcggtctgggcagcggtatccgatgctgcggcatcctcctgcaccacggtgcgcgggtccacataggggtccacctccagcgtgccgtccttcatggcaaagtaggcgttggcgatatccaccaccagatcaccggtgcgggcaccgtagccgccgtactccaccgtaatgccgatggcgatctccggattatctgccgggaggtaggcgatcatcatggcgttcaggtagtgcttgcccgatgcgtaggtctcactgcgctggggggtgccggtcttgcaggcgatggcaatggggtagctggagatcttgccgctgatggtgctgggcaccagtgtcatgccctgccgcaccagatcaaaggtgttgccgttgccctcgatgatatccatcacctccggctgggtctcactgagcacctcgccggtgttggtatccagaatggccttgacaaagtgggtgcggtagcgcacaccgttgttggccagcgtggcggcgtaggtagccaattggatggggcttaccaccgtgttgccctgcccgatggcggcctgaatatccagcgaggaggtgtagtttttatccgtctttttggtcaggcgtcccacagcctcgtttacctccacgccggtgcgctgcccaagacccagcttgtaggcgtaggcatcgtagacgtcactggtcaggcggcggcccacatcgtagaagaagatgttgcagctccacttgatggcggtgaccacatcaatgttgccgctgtggccgtggcgggtgcagcgggggtggtaatccttataataggtgtacacgccggtgcagttgacggtggagtactggttgatcaggccgctgtccaacgccgccactgccacagcaggcttaaaggtggagccgggagtgtacaggccctgcagcgcccggttgaacaggggcagactggggtcggcgctgtactcggaatagttggtggcatacaggttctggtcaaagctggggtagttcgcagccgccagcacgctgccgtccttcacatccagcaccaccgcagcacaggcggcggctttcatatcgccggtgttgtacacccggttgatcatatcgatgttattggcaagggccttgtctaccgcccgctgaaagtcgctgttgatggtcaactgcacggtatgccccggctccggcacagtggtgatcttggtatccacgatcacgccgtccgaattgcgggtgatagtctccacaccgtccttgccgcgcagctcgtcctcgtacacggattcaaggccggagatgccgatcacatcgttcatgttatagcctttttccttgagcggataggtcacctgaccgttttcatcggtcaccttccacttttcggcggtgatcttgcccacacgccccagcacagcggggaggatatctccctgctcgtagctgcgggtgctggtctccacgatctccacacccggcaaagtgagggaatgttccttgatggcagcaaccgtcacctgactgacgttttctgccatgatgaagttgttcacgttggaaaaggcctgccggtccatctcataatggatgcccgccagcacccgctgccacggcagagaaaagctttccagatggttcttctccaccagcatctccatcacatcgttggcggtggcatactgctgcaagcccagcgtctccttcatgtctgccagcgttttctggtcgctggtgctgtcggcgctgtccgtaaaggtatagttgccggcggcgtccggctcactgatgagcagggtgtccagccatttttcatcgttttggcgcaaaagctccacgatctgctgcagcatggtgtccagatcctgatcccccatctgcagcttgttcagcacaacattatagccggtgctggtggtggcgatgcgcttgccggtgctgtccacgatattgccgcgcgcggcggtgaccgtgaacttataatccgtggtgttggtggcttttgccttgaaactgtccccgttgaccagctgcagaaagatcagccggaaggtgtacagccccatgatgatgcaggccactgcgatgagcagcagcatccgccgcaccacgaccttgcgttcattttcgttcatctggttctccttttacgggttagaccacaccgttgtcgattccaaacccgtcatggatgcgctgcaccagccagaaggccagcagcgccgccgggatggtcagcactgcactgggcagtacaaaggcaatgtaccgcagtgcagcgccggcatagcccggcatataatagaaaaacagccagtccatcgagagcaccagcagtgccgtcacggtgcttactgcggcaaagttgccggggtttacctgcaaatacagctgcaccagcaccgataccccaaagcagagcagcagcagttccagcgccagcatgcccaccgtgcgcccggcggcgtagtcccacaaaagaccgcctaccgtgccaaacagcgccccggcaaactctccctcaaatactgccaccgccagacacagcggcagcaccagcagcggctttgcctgccccagctgaaacagcccaggcgtagtctgcaaagcggcgcacacaaacagcgccagcacatagcagccccacttcagcagctgactgcggctgcgcttgcggcgagattccatagcagtgttccctccttagtatgcagtaatgataaaaacgtgcttggcggtgcgggggtcggcaccggggcgcaccaccgcaatggaggatttgccgctggcctccggcaccacgtcctgcaccgtacccaccagaagatccggcgggaacaccccgcccagaccggtggtgatgatctgatcgcccgcacgggtctcggtgctgcgctccagattggtcagggtgcacaggccatccgccgcataggtagtattgccgttcaggataccgttttcccgggtgcgggagacaacacccgccgcgttgaagctggggtgcaggatggtcattaccttgcagctggtcgggtcggcttccaccaccatgcccagcagatagccccggtcactgatgaccgcatcgttcaccgctacgccgtctgcggtgcccttgtccagcgtgaagccgccgaactcgtccagcgggtcgcggccgatgacaaagccggacacataggtggcattgctattctttttctgaatgttcgccagcgccttgtaggcatcgttctcggccttgatgcggtcgtagtccaccatctgctggcgcagctcggcgttttccgcttccagctgctcgttctgctccatgacttcatcgatgctggtgtatttttcccacaccgcacccacgccgccgctgaccacagccgccgctttctggaagggagtcaggatcacgcccagcagctcctgcggggcagcggtcaggcggccgttggctccggcgtaggccatgatgcccaccagaaataccgccacagccacaaggatcttgaatttccaggtatcaaaaaagtctttcaaagggtccttccctcctgtcgggatgcccgcgtcctaccgcaggcctttgcatgaaaaaagcgcggacagccgtgccatccgcgcaagatgcagtgtttgcagcggaaaaacgcacagctgctgtgtctgaaacttttccgcatttaaagcagttctctccgcagagagccgctcttacatatgtcctccatcggtgtccagcacatcatgcagcacatctacatgatccagcaccgcaccggcacccttggccacgcaatccagcggatcctccgcaatatggacgtcaatgccggtctcactctggatcagctgatccagaccgcgcagcagagcgccgccgccggtcagggtgatgccgcggtcgatgatatctgcgctcagttccggcggggtgcgctccagcgtctccttgatggcggtggtgatcttgaccagacactccagcagcgcgccgcgcacatcctcagagtgcaccacgatgttcttgggcagaccgtctacaaggttgcggcccttgatctccatggtcagctccgggtccagtgcataggcagagccgatctcgattttgatctgctcggcagtacgctcaccgatgagcaggttgtacttgcgcttgatgaaagcgatgatggcctgatcgaacatatcaccggccatgcgcacgctgcgggaagccacgatgccgcccagagagatgacggcgatctccgccgtgccgccgccgatatccacgatcatgctgccggtgggctcgctgatgggcaggcctgcaccgatggcagctgccatgggctcctcaatgacagacacctgacgggcaccagccttcagggtagcctcgcgcacagcgcggcgctccacctcggtaacgccggagggaatgcagatgaccacccggggacgggagaacatgctgttgccgcaggcctttttgaggaagttctccagcatattggccgtgatgtcgaaatcggcgatgacgccgtccttcaggggacgcaccgccacgatgctgccgggggtacggccgatgacagcctttgcctcgccgcccacgcagcgcacctcgtcggtcttggtgtccaccgccacgaccgagggctcgcgcatgatgatgcccttgcccttcatgtagaccagagtattggcagtacccaaatcaatgccaacgtcctttgacagaaaactcattgttccaaatctccttacgatcgttccttaaatctatcccagaatgccggacggcctgctgcaaacagtccctcctgcgcagaataacacggttctattatagccgcaagtgctccatttctcaagcgtttcggcaagttttctatcatttttccatttttctcacaaaaaatgcgccagcgtctgtacggtgcggctgaccggcagccccataatggtgtaatagtcgccctcgatgcggtccagccacagggctgcgcgcccctgaatggcataggcaccggccttatcgtagggctccggggtagcagtgtagaacgcgatttcttcctcccccagcgggaaaaaggtcaccttgcagctgtccacaaaatgctctgccctgtccccttttgcaatgcacacgccggtgtgcacctgatgggtcttgccggagagcgcgcgcagcatccgcttggcgtcctcggcatcgtggggcttgccgaacacagcgccgtccacgtccaccacggtgtcgcagccgatgaccacggcatctgggtgctgttttgccactgcaaggcacttgccgatggccagctgctccaccagctgcgccggagtgggggcagtgacggcgctctcatcaaaatcgctgacacagaccgtgaaatcggtggtgtacagggaaagcagctcccgtctgcgggggctgccggaggctaagatcaaatgattcataaaaccctctcagtcacctgcggtgaccgctctcccgaaggggagagcttttttcatcaatcggtttactcttttaaattctcccctctcgggtgtcaatgcgaagcattgacgaagagggttattttccggtagagccaaagccgcccacaccgcgctgggtgtcgcccagctcctcggcgggcacaaaggcggcggtgtacaccggggcgatgcacagctgcgctacccgctcgccgggctgaatggtataagcctcggcacccagattgaccatgggcaccttcagctcgccgcggtagtcgctgtccaccacacccacgccgttggccatgcacaggccgtgcttgatggacaagccgctgcgggcgtacaccagcgccacactatgggcgccgggcagctcgatggcaaggccggtgggcaccagcacccgctgcatgggggcaacggtcagtggtgcgtccagcacagcgcacaggtcagcggcagctgcgccgggggtggcataggcgggcacctttgcccgggcatccagtaccttatattttacagtgatgggttccatcgtataacctcgtttcgttttttctgctttcgtcagttcgttcctttaaaatacagaccgcgggtaaaatcgccctcaaagggggcgtgggtgcggatgctgtccaagatctgcgccgcttcctcgcgggattccagcgtaaagtaggccacgccatagtccaccgccagtgcgccgggcttatcacccatgtagatgggcaccgggttatagatggtgcgcaccccaaggccgcaccgcaccgggaactttttggccttgcggtcggtcagcacgccggtcttgtcgcagtgggcgcagtcgtggatgttttgcagcgggcaggcgcgggtgagcatcagcggcatatgaccgtagatcatcacgccggtgggcacaggcttaccgttccgggtgggcgcaatggacgcaatatcgctgtcttttacctccggcaggatgagcaggctggaaagtccctgctctgcatagaactgtgccgccacattgttggtgatgttcagtccaaagccgccggtcatgggcaggccgcggcacagccgcagatgggcgatgttactgacctcgtatccggcaaagcccgcgtcctgcgtggcagcaatgcggcgggcagtgtcctgctccagcgcaccgaacatgacccggggcagctccagaagggtctttgcccgccactcccggggcacacggtcggcctgcgcaatgggcagaatgagatattccaccccgtcaagtgcccgctccggcacctgttcccagcgctcgaaccggacacgcagggtgcggcggggcggcagagttcgctgcggcagggcggcgacgtgctcctcggtggtaggccacgggcgcagcacctcccgctttttgagcagggcatccagtgcctcccggcgcagctcgttcacggcactgccggggatgaaccacggcccgccgtccatttccacagtgatcttctccgccgtaaagggggtgccgccggtctttgtcaggctgcggttcaggctctcggtggggtcggtgcgggcgggctgcggctcggcatccccataggcaaaggctttgttgccgtcggcatcggtaacggtcagcttttcgccgccctcctcgatctccagtttcatctgcaccggcacgcgggagcgctcgcggcggtaaagctcgcgcagcatgggcagggtctttttggtcagctcggcgtcagcttcgctgcgcacaccgaacatggtaccgtcgatttttccgtctagatagccggaggtgaaaccggagcggctgaaggcgttcttcagcagatcgcggtcgtaggcgcggccctcgcggcctgccagacaggcactgaccgccgctgccacatactccggcgtgcgcagacgaccctcgatctttgccgatgctacgccaagcgcctgcagcttgtccagcttgtcgatggcggagttatccttaagggagaggtggtgcagccgtccgggcttgccttccggcagggcattggcttcaaagggcagacggcaggggcccgcacaggaaccgcggttgccgctgcgcccgcccagaaaggcggacatatagcactggccgctcacgctcatgcacagcgcaccgtggatgaagcactcggtctcgatgccgcagtgctttgtgatgtgctccacctcgggcagactcagctcacgcgccagcaccaccctggtaaagcccagctccttcagttccagtgcaccctgcagggtgtggacgctcatctgggtggagccgtgccggggcagctgcggggcgattttaccaattaaagtagccactgccagatcctgacagatgaccgcatccgcgccgctggctgctactgcgcggatagcctgctccagcgcaggcagctcggtgccgtacacggtcgtattcagcgcaacgtgcaccgccacgccccgggcgtggcagaagcgcacggcttcctgcagactgtctgcgtcaaagttgccggcacccgtgcgggcgttgaagcccgaaaagcccagatatactgcgtctgcgccgctgaacaccgcagcgcggagcatttcttcactgcccaccggggctaagatctcgatccttgccatagttctccttctgacttctatttatataaggtacgttcagttggtctcgtctgtctgcgcactatctgccgccggggcttccggggcgggctgctcctgtgccgtctctgccgcagcgcgggcggcgcgctcctcccggcgggtctcgcgctggcgctccttggccagctgctcccgcagggcggcagcttcccggcgcagcacggcgttttccgccagtgccttgtcctcagccagctttgcccgggctgcatctgcaatgtagtcctgaatctggctgcgcatattctcggcgctgccggtgctcttgcggtattcgtccagataatccatcgcgcagaacaccgccgccttggtcaccgagaggttatcgttggtgtccagcagctttgtgatgtcctcgtccagctttttggcaagacccaggatgtacttttccgaatctgtagttgcgatagcatacggtgtgcccgcgatgttgacccttaccttgtttaccatggtgttttccccttttttcctgtatctgtacggcgcaaggccgtttgttctgcatcttgccgggatttggtatcgttcccggtaacgtttcggcatttgaaaacgtttcgatggagtttcccgccccattactgccggaattactccccgaaaaacgtttcgcggctcagttctaccttctattataatataaatacgccgcaagaaaaagtggaatttttgaaatttcggcatatttgtcagaaagtggcctgaaaaaatagcagttacggaaaaaaagcgcctgtttccttgcatttataaatcgttcatattataataactttgttatgttggcagccgggcgaaagagggaacgtttctgctgctattatctactcaattattttagcaaagcaaacgcttatgcggataggagcacactatgacatcaaaagaatttggcaaaattcttcaggacaagctcaccagtgagtacggtgtggagctgaatgttgcctccaaccagcagatctaccgttctctggctctgatctgccgtcagatgatgagcgagaaccacaaaaagttccagtccaaggctatcggcaccggcaccaagcaggtctactacctctgcatggagtttttgatgggccgcagcctgaagatgagcctgttcaatctgggtctggacgaggttgccaagaaggcactggccgacgccgacatcaatctggacagcatttttgaggaagagcccgatgcaggcctgggcaacggcggtctgggccgtctggctgcctgctatctggacggcatggccaccaccgatatctgcggcaccggctactccatcctgtacgagtacggcatcttcaagcagaagatcgtggacggctggcagcaggagcgcgccgacaactggctgcccggcggtcaggtgtggctgaagagccacccggatcaggctgtggagatccgctttgacggcgagatccacgagaactgggacaacggcttccactacatccagcacaccaactacaacagcgtcatggccattccctccgatatgtatgtgcagggctacgatggaaagggcgttgcaaagctgcgtctgtggcaggcaaaggccccggactttgatatgtccagcttctctctgggcaactacaacactgctatgagcaagaacgccaacgctgagctcatctccaaggtgctgtaccccaacgataaccacgttgagggcaagatcctgcgcctgcgtcagcagtacttcctgtccgctgcttctatcggcgatatcgtgcagaaccacctgtccagctacgctacgctggagaacctgcccgacaaggtcgccatccagctgaacgacacccaccccactctggccatccccgagatgatgcgcatcctgctggatgagtgcggctttgactgggacaaggccttcagcatctgccagaaggtgttctcctacaccaaccacaccgttatggccgaagctctggagaagtggaacgtggacatcttcaagatgaccctgccccgcatctaccagatcgtggtggagatggaccgccgcgcccgcgaggagctggcaaaggccttccccggcgatcagggcaagatcgactacatggcactgatcggcgacaatcaggtgcgcatggccaatatctgcgcctacaccgccaacagcatcaacggcgtttccaagctgcacagtgagatcatcaaggagagcgttttccacgattactacctgttcaagcccaacgccttcaagaacgtgaccaacggcattgcataccgccgctggctgctggcctctaaccccggcctgtgcaagctgctggacgagaccatcggcgacggctacaagcacgatgcttctgatctgaccaagctgaacaagtacgccgacgacaagaccgtgctgaagaagctgaatgagatcaagctggccaacaagaaggattttgcaagctatttggcaaagagcaccggtcaggtcatcgaccccaattccatctttgactgccaggtcaagcgtatgcacgagtacaagcgccagcacctgaatgcgctgaacatcgctgcacagtacctgtacctgaaggagaaccccaacgctgactttatccccaagacctacatcttcggcgcaaaggctgctcccggctactacatggcaaagcagatgatccgcatgatctgcaagctgggcgatctgatcaacaatgaccccgctgtgcgcgacaagctgcgcgtggtctatctggaagagtactgcgtctccctgagcgagcacctgatgcccgctgccgaggtttctgagcagatctctctggcaggcaccgaggcttccggtaccggcaacatgaagttcatgctgaacggtgcaatcacgctgggcactctggacggtgcaaacgtggagatcgccgatgctgccggcaaggagaacgagctgatcttcggtatgctgacccccgaggtgaacaacctgaagcgggtgggctaccaccccaacgcctttatcatgggcgacgacgttgccaacagcgccctgaacttcttggagcgcggctggaacggcgagaacttccacgaggtcaccgagaacctgcgcagcagcgacccgtacatggtcatggccgacttcaaggactaccgccgtgcacaggccgacctgcagaagctgtatgctgaccgcgagacctgggcccgcatgagcctgaagaacattgccaacagcggcatcttcagcgcagaccgcgccgtgctggactacgcccgcgatatctggtacgcttcccccgtgcccatgggcaagtaattttcccctgtaaagccgcaaagccccggtggcatttcgcccgccggggcttttttgagaaaggacgatcttttttgtcttgtctgttcaacagctacgacccctactttaagcagccctttggtgccgtgcgcgccgggcagactgtgcacctgtccctgtgcatccccgaggaactgggctatgtggacccgcaccttgtgctgcaaaaggagggcaaatacgatgtgcccgtgcactaccgcatgaaatttgacggccagacgcctcaccagaaccacttttcggtggatgttgtgctgggcgacccgggcttatacttctattactttgacctgtatactgacttccgccgcatcgtgcgcggggcagacaactgcggcgtagtcagctggcaggagggtgaaagctggcagatcacggcctacgagccggatttccagacgccggaatgcatcaagggcaaggtgttctaccagatcttcccggaccggttctgtgaaggcattgagaacaagcccatgcccttcccggaccggctgtatcaggccgataagcacgccgaacccttctggcagcccaacgggaccggcggccacctgaacgaggactacttcggcggcgatttagagggcatccgcatcaagctcccctacctgcgggaaatgggcgtggattatttgtacctgaaccccatctttgaggcgcattccaaccaccgctacaacaccgccgactacctgaacgtggacccgctgctgggcaccaacgaggagtttgaggtgctctgccgcgaggccgccaagtacggcatcggcatcgtgctggacggcgtgttcagccataccggctccgacagccggtacttcaaccgcgagggacgctacggcgagggcggcgcttaccgcgacccaaactccccttaccgcagctggtacgattttgaccccaagtacaagggcggctaccgcagctggtggggcttcgagaccctgccggaggtcaacgaggagaccccctcctttgtggagttcatcaccggcgagggcggcgtcatcgacacatggctgcgccggggcgctgccggtttccggctggatgtggccgacgagctgccggacgcgttcatcgagaaaatccgcactgccgtcaagcgggtaagcccggaaaagtttttgctgggcgaggtgtgggaggacgccaccaccaagttcggctttgaccaccgccgcacctacctgctgggcaaggggctggacagcgtgatgaactaccccttcaagaactccgtgctggattttgtaaagggcaagcccgcccagcaggccgccaacgagatcctttccatctgcgagcactaccctgcccctgccatcaacacggcactgaactttttgtccactcacgacaccgagcgcgctttgaccgtgattgcggacgagcccgccaacggacgcggccgggagtggcagagcggccgcagcgtgaccggcgaagcctacgaggagggcatgctgcgcctgcgcatggcctatgccatcatttacaccctgcccggcgtgccttgcctttactatggcgacgagatcgggatgcagggctaccgcgaccccttcaaccgcgccttcttctgctgggacagccacgaggagcggctgcgcccggtgctggcacagctggcgcagctgcgccacagctgcgaggccttccgcaccggcgagctgcgggtgctgcgggctgaggacggcattctgcactaccagcgcatcggtaagaccgagactgcggagatcatcgtgaaccgttctgagcacatcatcgtggagccgctggcttccggcaagcacactgaggtaaaccccatgggcttcaccatcgtggtggaggaaaacggccataaccccaaccacagctactacgatatccagtgatgcctgcgaggctgtaaccatttaaaatgctctccgcttgcgctctgagcatccatagcgggatcctattctttatttgtaagtcgggaggctctgcggagcctcccgacttacttttttcacagggtggggcgcagtgatttacgggcttttttcccatttttgtctatattttgttttctgtgcaacgttccagtaaaaagctcttgaccttcccccaaggggatgccgtataatagcagcataaggaggtaacataccatgcagatctcccccattctctggctggctgcagccgtgggctttctggcactggaggccagtacctttaatatgacctccatctggtttgccatcggctctgccgccgcattgctgtgctgcgtgttcaccgggtcgttccgggtgcaggcagtggtctttctggtggtaagcatcctgtgtctggcagccttccgcccgctggcggcaaagctgcggctcaagcataccgccaccaacggcgaccgcaatctgggacgggaggccatcgtgctttcccctgtcactgccgaggtccccggccgggtacggctggacggcgtggactggaacgcccgctgcgccacccccggcgacaccctcacacccggtgcgctttgccgcgttaccgagatccacagcaccctgctcatcgtagagcctgttctgaccgaaagccgcaacccccacacaacaacctgacaaaggagatgtattatggttctgttttttgtcatccttgcgcttgtttttgttctggtgctggtcattgtttccaacatcgtcattgtgccgcagtccaaggtatatgtcattgagcggctgggcagctattccgatacatggactgccggcctgcacgtcaagattccctttattgagcgcattgccaaaaaggtaagcctgaaggagcaggttgcagactttccccctcagcccgtgatcacccgcgataacgtgaccatgcagatcgacacggtggtgttctttcaggtcatggacgcaaagctgtacacctacggcgtcaaccagcccattgccgccatcgagagcctttctgccaccaccctgcgcaacatcatcggtgagatggaactggatcacaccctgaccagccgcgatgtcatcaacggcaagatcaccgccatccttgacgaagccaccgacaagtggggcatcaaggtgaaccgcgtggaggtgaagaacatcatcccgccgcgtgagatccaggaagccatggagaagcagatgaaggctgagcgcgagaagcgcgccgtcatcctgaaggcagacggtgaaaagcaggccgccattaccgccgccgaaggcgaaaaggaatctgccatcctgcgcgctgatgccgtaaagcagcagcgcattctggaggccgagggcgaggcacaggccattctggctgtgcagaaggccaacgccgatgccatccgtctgctgaacgaggccatgcccagcgacaaggtgctggccatccgcagccttgaagcgctggcgaaagttgccaacggcaaggccaccaagatcatcatcccctctgagctgcagaatctgggcggcgttgtgcccagcatcaaggagctgatgaccgacccgaaggacgccgagtaagcgcccacttatccagcagtaagctaaaacagctcccggtcacgttaagcggcgtgaccgggagctgttcttttgctatttattctttatccggggggatcacttctcccctttttcctcgttctcctgtgcctgctgttcgcggcgcagctctttgatgcgctttttctcgctctggacgtggggccacggccaggagaagccctcgttctgcttgcaccagcgggtaagggggtagaaggcaaaggccaaaccaaaaatgtacagcagagcgtacagcagggcatccagtgtaatcagggcatccagtgcaccgatcaccgccacaacgcagcctgcctttaaaaagaactggccgttctggcggcagtattcctcaaagttttcggccttgaccgccctgcgcccctgatcgccccacacgcggggatttttcatcaccgaaaaaccgtaaaaggccatcatcaggccaagggtaagctgaaagccaaaaaacatgggtcatacctcgtttttatcagaatcagtcctcaaacaggggcttcataaagggcaaaaaatccagcgttgcaaagtaatcgcggggggtctgggcgcggcggatcagccggtgagagccgtcctcgcacagcagcacctcggcacagtgcagcttgccgttgtagttgtagcccatagcggagccgtgggcaccggtatcatggatgtaaaggatgtccccgatgtcgatcttgggcagcatccggtcaacggcaaacttgtcgttgttctcgcacagaccgcccaccacgtcgtacttgtggtcgcagggctcgttttccttgcccagcacggtgatgtggtgataagcgccgtacatggcggggcgcatcaggtttgcggcgcaggcgtccagaccgatgtactccttatagatgtgcttttcgtggatgacggtggacaccagtgcgccgtaggggccggtggtaaagcggcccatctcgctgaagatggccacatcgcccatgccggcgggcacaaggatctcctcaaactttttgcgcacaccctcgccaatggccatgatgtcgttctcggtctgctccgggcggtacgggatgcccacgccgccggacaggttgatgtagctgatgtgcgcaccggtagcctgctgcacccggacagccagctggaacaggatgcctgccagctccgggtagtaggcgtccgagatggtgttggaggccaagaaagcatggatgccgaactgctttgcgcccttctgcatcagctttttgtagctgtcgatcatctgctgctcggtcataccgtacttggcatcgccgggcttgtccatgacctgaaagccctcttcgctctcgcccagctggaaggtcccgccggggttatagcggcagaagatctcctgcggcaccccggccacccgctccagaaactccaccatggtggcgtcgtccagattgatgtaggcgcccaactcgtaggccttctgcatatcctccacgggggtctggttggaggagaacatgatctcgtggccggtaaagccgcaggcctcgctgagcatcagctcggtcagggaggagcagtccacgccgcagccctcctccttgaggatctgcaggataacggggttcggcagtgccttgaccgcaaaatactccttgaagcccttgttccagctgaaggccttgttgatgcggcggacattctcccggatgcccttctcgtcgtagacgtggaacggcgtgggcacatcctcgatgatctgctgtgccatcgcctcggtcagaaacggtttcttttccataataacatccctctcgttttgcgcagcccggcatgttccggcctgcggtctatcccatgcggcccagtgccgcaattcaagctgttacagtttcaggttctcccgggtgggggtaaaggtggggatcatggccgccagctggcgcaccacgccctcatcgttgtgggcagcagcggcttccagcgcctgcagctgctcgtagaactcggccagatcaatggtgcgggggcttgccacaaagatcttgttgtgctgggtgcggcgcatcttgtcctgctcctcgtccatcatcagctcttcgtaaagcttttcaccggggcgcaggcccacgatcttgatctccatattcacgcccggctcgtagccgtaaaagcggatgagctgcttggcaagatccataatgcgcaccggctcgcccatatccagcacatagatattgccgctctcggccaatgcgcctgcctgcagcaccagctgggctgcctccgggatggtcataaagtagcgcacgatgttggggtcggtcagggtgaccggcccgccctttttgatctgggcttcgaacagcggaataacgctgccgtggctgcccagcacattgccgaaccgcaccgctacacacttcatatccgtgttgcccgcaaaggtctggatgagcatctcgcagatgcgcttggtgcagcccatgacgctggtggggttcacggccttatcggtggaaagctgcacaaagcgctccaccccgtgctcgctggcactgaccagtaggtttttggtgcccagcacattgttctttacggcctcggcggggcttacctccatcagcggcacgtgcttgtgcgccgctgcgtggaacaccaccgtggggtggtaggtatcaaaaacctcgtccagacgttttttatcccgaatggagccgatgagcaccgtgaccgggatatcgcggccgtacttctgctgcagttccatctgcagctcgtaggcgcagttttcgtagatatcaaagatgagcagctttccgggcttgaagcgcatgacctgacggcacagctcgctgccgatggaaccgccgccgcccgttaccagcaccgttttgccggtgaggtagccggagatcttgtcggtatccagcgtgacctcctcgcgggagaggaagtcggcggggttcagctcgcggaacacctcctgctggggtgcgccgctgcccaccagctgcgggtcactgagcagctgcaccgcgcagtgggtgctgacgcacaggtcgatgacatggctcagcttgctgccctttaaggttgggatggcaatgatgatgctgtggatgccgtagcgcgtgcacagctccggaatgtcctccagcgtgcccttgaccggcacgccgtggatggtctggttcagctttgcggggtcatcgtccaccgccaccacggcgtggccgtattccttgttggatttgcacacattgatggcccatgcaccggcttcgcccgcacccacgatcaacaccgggcggttggggtccttggcgggcactttgcgcatccgctcacccagcggatggttcaaaaacagccgccaagccaagcggctgccgccgatgaacaaaaagatgagcaccgaggccatgcagttggcggaattgaacagcacaccgtggataaaacggcggttcaccacatacaccacggcggtgggcacggcgatcatcccggcaaggcggatcagatcccgctcgccggcgtacttccacagcaccgagtacagcccgcctgccaggaagcagacgatatacaccgccacgatccacggcaggttttcgtacagcagggcacggttgtgcggccaccacccggcctccacggcaccgtctgcccgcagcagcagggcaaaataaaagctgaatgccacaatggctgcatccagcagcaccagcagcgcacggcgcagcagcacctgcggggtattcttggttttatctttcacttacgatcctctttttccctctcagcgccaagggtttgccctgcgctgctttttcagcagtgttctcccccggcaatgccggaaggatacaactacacgtttgtattatactcacaatccccgcctgtgtccagaaaatttacgtttttatcactttcccctgtttttcccggtctttgcctgccgcagcaccgcccgcagctcctcccaaagccccagcggcagcgccgccagcaaaaacacgatggccgtcaccgtgccgccagccgtcagcactgccagctgccccggcaacccttgagccggaaagcccgtcagcgcccggcgcacaccccgccctgccgcaccggcggcagccgccgccagcagcggcgcacccagccaccgccggaaggcgtgccctgtaccgctggaaagcagcagccgcccggtgttggctgcgcaggtgtaaaagctggaaagtaagatcaccgtcagaaagccccgcatcccgtaccggggcagcagcaccgccaccccgccaatgcgcagcaccgcgtcccacacgctgtaccggaaagcggccttctgctccccgatgcccttcatggcgccgtccaccatgctttccagatacatcagcggcatggccggggcaagggtctccagatagaacccggcctccgggctatggtagagcagctgtgccagcggcctgccccacacccagaacagcgtgcctgccagcatggagaagtatcccgtaagccgcagcatccggtccagcagggcgttcagccgggcggtctgcccctctatatgcgcctgtgtgatctccggcatcagcaaaacagccagactgcccagcagcccaaaggggaaattgagcagcggcagcgccatgccctttaaggtgccgtactgctccagcgcagcggtgcgcccgccggaagcccccagatacaccgcaaggcaagcgggcaccagcatattctcggcggtgtgcagcgcgctggaaagcaccctgccgccctccaccggccacaggatgtcccacagccgccgggacgcctcccttggcgggcgcggcgctgtgctgccgaagcagcgtgccgcctcccgccggtaaaacaatgccatcagggcggtggatacggcctcgctcaaggcggtggcagccagcaccagtgcacagcggctgccgtccggccagccctgcgtgcgggaaagcgcccacaccaccgcagcaatgcgcaccgtctgttctgccagctggctgagcacgttgggctccacccgccgccgtgccagaaaaaagccgcgcagcactgccgagacagccatccatggcagtcccagcgccgaggtgcgcagcgcggcagcggcacggacatcccccagccaccattttgccgcaaggcctgcggtggcaagctgagcgaccatggcaagcccgcccagcgtaagccctgccagcaccagccgcaccagcatcccgcgcgcagcggctttatcccggctgagctcctcggtcagaagccgggcagcggccaccgagatgcccgccgtggccagcgtgacgaacagcccgtacaccgccagcaccagctgatacagccccatccccgccccgcccaaggcgttggccagccagatgcgcagccccatgccagccagccgcagcaccacgtccgagccggtaagcagcgccgcgtttttaaaataactctgccgcaccctgcacctccccctgccccggaacgggcgttcacggttcagcctatgcagcggctttgcaaaacatgagcggcgctatgggttgtttctgcgcactttttatggtatagttaacagtggtcaggcagggcgcaagcccccgcctgtattttgagcaaggaggaagcgcaccgcccgggtcctgcccctgccgtgcgcgacaaagagaatgagcgaagaatgtacccatgactgctctaattgcagtgcagcctgttcttcccgcgatgccgctccgcagcacgatgcccccaaccccaacagcagtgtgaaaaaggtcatcggcgttgtttccggcaagggcggcgtgggcaagagcatgaccagcgctctgctggcctgtgccatggcccgccgcggctaccactgcggcattctggatgccgatatcaccggcccgtccatccccaagctgttcggcattcatggccgtgccatggcggacgacaagggctgctggcccatccagagccgcatgggcattgatgtaatgagcatcaacctgctggtggagaacgaggaagaccccgttgtgtggcgcggcccggtcattgccggtgccgtcaagcagttctggaccgatgtggtctggaaggacgtggatttcctgttcgtggatatgcccccgggcaccggtgatgtgcccctgaccgtgttccagagcctgccggtggatggcatcgttgtggtggcaagcccgcaggagctggtaagcatgatcgtggcaaaggccgtgaacatggccgagatgatgaaggtgcccatgctgggcatcgtagaaaacatgagctacatcgtctgcccggactgcggcaagcacatcaatgtgtttggcaacagccatgtggacgaggtggccgcaaagcatcatctgcctgtgctggccaagtgccccatcgaccccaaactggcagagctttccgatgccggcatgatcgagacctatggcggcgaatttttggaaggtgccgcagacgcctgcgaaaagctgctgaagaagtaactgcaccccgccctgtgcccgttgcgacacagggctttttgcttagataagcccgccgacgtgcaaaagacattcttttccgtacggctttggagtggcagcgcactttaaaaaacaaggttcgcggcacattccggcttttaattttcgttttgtgaagcagctgtgactttttatctgtttttttaaacaaattctgctttttgctattgtaaaacccaccgcaaagctttataatagtaaagtaagcattgcccgcttgtgcgggcgtgccgtgcaagcatggagaaccggaagcgcccggcatctgcaaggatatacccgctgtgcggcgggcaaaggcatttccgctttttcaaatttatagagtaattgggaaaaaggagtattctattatgctgacgaatgaatacctgaagcgtgtttacgagggtctggaaaagcgcaacgccaacgagcccgagtttctgcaggctgtgcgcgaggtgctggagagcatccagcccgttgtggaaaagcaccccgagtacgagaaggccggtctgatcgagcgcctggtggagccggagcgcatcatcaccttccgtgtgccttgggtggacgatgccggtaaggtgcaggtaaaccgcggctaccgcgtgcagttcaacagcgccatcggcccctacaagggcggcctgcgcttccatccctctgtcaatcagggcatcctgaagttcctgggcttcgagcagaccttcaagaacagcctgaccaccctgcccatgggcggcggcaagggcggctctgactttgacccccacggcaagagcgacatggaagtgatgcgcttctgccagagctttatgaccgagctgtaccgccacatcggccagttcgtggactgccccgccggtgatatcggtgtcggcggccgcgaggtcggctatctgttcggccagtacaagcgcctgaccaacagcttccagggcggtatgctcaccggcaagggcctgacctttggtggttctctggcccgtacccaggctaccggctacggcctgtgctacttcaccgctgaggccctgaagtgcatgcggaacgacagcctccagggcaagaccgtggtcatctccggctccggcaacgtggctatctacgcctgcgaaaaggcgacccagatgggcgccaaggtggttaccatgtccgactccaacggctacgtctacgaccccaacggcattgatctggcttacgtcaaggacctgaaggaagtgcgccgtggccgcatcaaggagtacgccgagacccacgccggtgctacctatgtggctgattgcacccaggtttggactgtcccctgcgacatcgccctgccctgcgctacccagaacgagatcaacaaggagtctgccgaggctctggtaaagggcggctgcaccgtggtctgcgagggcgctaacatgcccagcaccccggaggccatcgaggtctacctgtccaacggcatcctgtacggacccgcaaaggcttccaacgcaggcggcgtggctacctccggtctggagatgagccagaactccgagcgcctgagctggagctttgaggaagtggatgccaagctgaagggcatcatggagggcatcttccacgcttcctacgatgcttctgtggctgccggttctgagggcaacctgatggtcggtgcaaactgcgccggcttcctgaaggttgctaccgccatgatggcacagggcatcacctactaagtcatactgcatcgtccaagagccgcgcccgcaggggtgcggctcttttttggtataatcccgccccgctctgcccacactggcagtaccttatggcagaaagggagttttgtatggacgagcagatgttttgttttcagtgtgagcaggcggcgggctgcaccgcctgcaccggcgcagcgggggtgtgcggcaagtcggccgagacagccgccgcacaggaccggctcaccggggcgctcatcgcgtttgccgggcagctcatcgcggcggggcgcggcccggccccggaacaggcccggctgctgatgcaggggctgttcaccaccattaccaacgtgaactttgaccccgccgccgtggacgcgctgacccgccgggtgcacgacgccagccccggcaccggcccggactacgacatgcaggccctctggcgggaaccggatgccgaccggcgcagcctgaaatgctttgtgctgttcagcctgcggggcatggccgcctacaactaccacgcccgggtgctgggccgcatcgacccggagctggaccggttcttctgtaccgccctgcaggccgtgggcgaccccggccagaccaccgacgccctgtggcagctggtgcaggccacaggagaagccagctaccgctgcatggagctgctggacgcggccaacaccggcgcgtttggcgatccggaaccggtgcaggtgcccctgaccattgaaaaggggccgttcatcgtgatttccggccacgacctctacgacgcacagcagctgctggaacagactgcaggccggggcgtcaacgtctacacccactcggagatgctgcccgcccacggctacccggagctgaagcgccgctacccccacctcaagggcaactttggcaccgcatggcagaaccagcagcgggagttcgaggacatccccgcgcccatcctgttcaccaccaactgcatcatgcccctgcgcgccagctacgccgaccgggtgttcaccacctcggtggtggcttaccccggcgtgccccacatcgacgaagggcgcgacttttccccggtgatcgaaaaggcgctggagctgggcggctacgcgcaggacaccctgctacccggcctgaacggcggctccacggtgaccaccggttttgcccgcaccgccgtgctgcagcacgcggacgagatcgtgcaggcggtgcgggacggtaagctgcggcacttctttctggtgggcggctgcgacggtacccggcccagccgccgctactacaccgagtttgcccgccttaccccgcccgacaccatcctgctgaccctggcctgcggcaagttccgcctgaacgacctgccccttggcaccgtgccgggcaccggcctgccccgcatcctggacgtgggccagtgcaatgacgcctacagcgccatccgcatcgcattggcgctggccgacgcctttggctgcggcgtcaacgacctgcccctctcgctggtgctgtgctggtttgagcagaaggccgtgtgcatcctcatcgcgctgctggcgctgggcatccggaacatccggctggggcctaccctgcccccgttcctctcgccgggggtggtgcgcaccctgcaggaacggtacggcctcaagcccattgccaccccggaagccgacctgcaggccattctgggcgggtgaggtttcgtttggttattttacaacaaacccgcaaatcaaagcattcctgagtcctgagtgttccgcatcactcagggcaaattcctccaaaccgccgtacccgcgtgcacaacgccgggtgcggcggtttggcttgtataccgcgcacagctgcgggggctcgcggcgtttcgcacaagaagcggcgcaatgtgtgtagcatatttggtgcagctgtcacttgaagatttttcaggaatctgtataatatcagatatcggaacaaaggcgttccgcaggggcatcctatgcccttgcggggcgcttttttctttttgcaggggataaaaagctgcggagggtgccgcagcccccggtaaacaagtaaaaaggatgggaaagactatggaaaactttacagagcagaaaaccacccttggtctgtacgacccacagttcgagcacgatgcctgcggcatcggcgctgtggtggacatcaagggacgtaaaagccaccagacggtggacgatgcactgtccatcgtggagcggctggagcaccgcgccggtaaggacgccgagggcaagaccggcgacggcgtgggcatcctgctgcagatcagccacaagttcttctccaaggtggccgaggagctgaacatccggctgggcaacgagcgggagtacggcgtgggtatgttcttcttcccccagaacgagcacctgcgggcacaggccatgaagctgttcgaggtggtcacccgcaaggaggggctggagtttctggcatggcgcgaagtgcccgtagaccccgatgccgtggggcagaaggcccgggactgcatgcccgccatctggcagtgcttcatcaaaaagcccgccaaggtaagcaagggcattgagtttgaccgccgcctgtacatcgtgcgccgcgtgttcgagcaggccagcaacggcacctatgtgcccagcctgtccagccgcaccatcgtgtataagggtatgttcctcgtgcacgacctgcgccgcttctacgctgatctgcaggacccggattatgagtccgccatcggcatggtgcacagccgcttttctaccaacaccaaccccagctggatgcgtgcacaccccaaccgcttcatcctgcacaacggcgagatcaacaccatcaagggcaacaccgacgccatgctggcgcgtgaggagagcatctccagccccattttgcaggacgatatgaacaagatcctgcccatcatcaacacctccggttcggactccgccatgctggataacactctggagtttatggtgatgaacggcatggacctgccgctggctgtgatgatcaccatccccgagccgtgggagaacaacaagaatatcagccagaaaaagcgggatttctaccagtactacgccaccatgctggagccgtgggacggccccgccgccatcctgttctcggacggcgacgtgatgggcgcggtgctggaccgcaacggtctgcgccccagccgctactacatcaccaaggacggccgcatgatcctgtcctctgaggtgggcgtgctggaatgcgacccggagaatattctggtcaaggagcgcctgcgtcccggcaagatgctgctggtggataccgtcaagggtgaagtggtggacgacgaaaagctgaaggagctttacgccagccgcgagccctacggcgagtggatcgaccgcaatctggtgcagctgagcgggctgaagatccccaacgtgaaggtggaaagctacaccggcgagcagctgacccggctgcagaaggtgttcggctacaagtacgaggacgtgaacaccatgatccttgccatggcgcgggcgggcgcagagccttccggtgccatgggtaccgacactccgcttgccgtgctcagcagccagcatcccccgctgttcaactacttcaagcagcggttcgcacaggtgacgaacccgcctatcgacgccatccgggaaaaggtggtcacctccaccagcgtttacatcggtgcccacggcaacctgctggaggataagccggagaactgcaaggtgctcaaggtgcacaaccccatcctgaccaacaccgacctgttgaagatcaagtacatgaacgtgccgggcttcaaggtggctacggtgtccatcaactactacaagaacaccagtctggaaaaggccatcgaccgggtatttctggaggtagaccgcgcctataaggagggtgcgaacatcatcatcctgtccgaccgggatgtggacgaataccatgtgaccatccccagcctgctggcggtgtcggcagtgtcccagtacctcatccgcaccaaaaagagcaccgcgctggcgctgattttggagagcgccgagccccgggaggtgcaccactttgctaccctgctgggctacggtgcctgcgccatcaacccctatctggcacacgagaccatcgggcagctgatcgacgagggtctgctggacaaggactattacgccgctgtgcaggactacgacaacgccatcctcaacggcatcgtgaagatcgcctccaagatgggcatttccaccatccagagctaccagagcagccagatctttgaggctgtgggcatctcgaaggaggtcattgataaatactttaccggcacggtgagccgcgtgggcggcatcagcatggcagacattcaggccgatgtggaggcgctgcataacgccgcctttgacccgctggggctggatatcaacatggagcttgccgacagcggtgcccacaagttccgcagcggcaaggaagagcacctgttcaacccccagaccatccacctgttccagaaagcctgccgcaccggcgattacgccaccttcaagcagttcacccagacggtggacaacatgggtgccgagggtgtgcacctgcgcagcctgctggacttcaactacgccgcagacggcggcatcccgctggaggaggtagagccggtctccagcatcgtcaagcggttcaagggcgctgccatgagttacggcgcactgagcagcgaagcacacgagaccattgccatcgccctgaaccgtctgggcgggcgcagcaataccggcgagggcggcgagcccgaggagcgctaccacagcgagagcaattccaagatcaagcaggtggcctctgcccgctttggcgtgaccagcaagtatctggtcagcgccgaggagatccagattaagctggcacagggcgcaaaacccggcgagggcggcaacctgcccggcgccaaggtgtatccgtggatcgccaagacccgccacagcaccaccggcgtgggcctgatctctcccccgccccaccacgatatctactccatcgaggatctggcagagctgatctacgatctgaaaaacgccaaccgcagcgccaacatcaacgtcaagctggtcagcgaagccggtgtgggcaccattgccgccggtgttgccaagggcggcgcacaggtcattctggtgtccggctatgacggcggcaccggtgctgcgccccgcacctccatcaagcacgcaggtctgccttgggagctgggcatcgccgagacccaccagaccctgatcctgaacggtctgcgcacccgcgtgcgcattgagagcgactccaagctgctgtccggccgggatgtggccatcagctgcatgctgggcgcagaggagttcggcttcggcactaccctgctgatggccgagggctgcgtgatgatgcgcgtgtgcaatctggacacctgccccatgggcatctgcacccagaaccccgagctgcgcaagaacttcaagggcaagccggagtacatcatcaactacctcacctttgtggcagaggagctgcgagagtacatggcaaagctgggcgtgcgcaccgtggacgagctggtgggccgcaccgacctactgcgggtcaagcccgccgccccgggcagccgcgcagcggagttggatctggactgcatcctgcacaaccccgccattgcaaacagcaacgtccactttatcaaggaggacagctacgacttccatctggaaaacacgctggacatgaaggtgctgatgaagaagttcaagctgggcagcaaggctccccagagcgtcagcctgaatgtttccaacgtggatcgcgcctttggtgccatctttggcagcgagatcacccgcaaatacggcaacgatctgccggatgatgtgtacaccgtgcactgcaacggtgcaggcggccagagctttggtgcctttatccccaatggcctgacgctggaactggtgggtgactgcaacgactatatgggcaagggtctttccggcggcaagatcatcgtgcgcccgccgcaaggcatcgacttcaagcccgaggagaacatcatcaccggcaacgtggcgctgtacggcgctaccagcggcaaggcgttcatctccggtgtggccggcgagcgcttctgcgtgcgcaacagcggcgcgaccgccgttgtggagggcgtgggcgaccacggctgcgagtacatgaccggcggcaccgtggtggtgctgggccagaccggcaagaactttgcagccggtatgaccggcggcattgcctatgtgctggacgaaaactgggatttctaccagcgggtgaacaaggagaccgtcagccttgagccggtggagcacaagtacgatgttgccaccctgaaggagctgatccgcgcccatgtggaggccaccggctctccgcgcggcaaggagatcttggataatttcagtgcgttcctgcccaaattcaaaaaggtgctgccttacgattacgaccgcatgctgcgggtcatcgcctcggtagaggagcgtggtctggacggcgagcaggcacagatcgaagcattctatgcagtgcagaagcataagtaaggaggggcagcagcatgggtaagacaacaggatttatggattatgcgcgcaaaaccagcacggacgttgcgccgctggagcgccttgaaaattttaacgagttccacatctggctctcgcgggagcaacagcagacgcaggccgcccgctgcatggactgcggcgtgcccttctgtcaggcgggcatgatgatcggcggcatggcctccggctgtccgctgaacaatctcatcccggagtggaacgatctggtgtaccacggcaagtgggagctggcgctccaccgcctgatggccaccaaccgcttcccggagtttaccagccgggtgtgtcccgccctgtgcgaggccgcctgcacctgcggggatgtgaccggcagcagcgtcaccgtgcgcgaaaacgagcacgccatcattgagacagcctacgccaagaactggctgaccgccaccccgccgccgacccgtaccggcaagagcgttgccgtggtgggcagcggccctgcggggctttcggtggcagagtacctgaacaagcgcggccacgccgttacggtgtttgagcgcgccgaccgtgtgggcggtctgctgatgtacggcatccccaacatgaagctggataaggcggtcatcgagcgccgggtcaagctgatgcaggccgaaggtgttgtgttccgcaccggcatggatgtaggcggcgccgtgcccgccgagcagctgctggcagattttgatgccgtagtgctgtgctgcggcgcaaaaaagccccgcgacctgaacgtgcccggccgggacgccaagggcgtgcactttgccgtggactacctgaccagcgtgaccaagagcctgctggactcgggttttgcagacggcaaggccatcaatgcagccggtaaaaacgtactggtcatcggcggcggcgacaccggcaacgactgtcagggcactgccctgcggcagggctgcaccgacctgatggcgctggaaatgatgccgcagccccctgccgagcgcaccgccgcaaacccgtggccggagtggccccgggtgctgaaggtggactacggccagaccgagtgcattgccaagttcggcaaggacccgcgcgtgtaccagaccaccgtcaaggagtttttgaaggacgaggccggtaacctgaccggtgccgtcatcagctgcctgaagccggagcgcgaccccgagaccggccgcaccagcatggtgcccaccggcaaggaatttacctacgactgccagctggcgtttatcgccgcaggctttaccggctgcgaaaactacacagccgatgcctttggggtggagctgaccgcccggggcaatgtagccgaccacagctttaagaccaacgtggacaaggtgttcgtctgcggcgatatgcgccgcggccagagccttgtggtgtggggtctgcgcgagggccgcgattgcgccgccgaggtggaccgctgcctaatgggctactcgaacctttaatttgccattctctttcctatcctaaacaagcagaagcgggagcccgttcaaggctcccgcttctgcttttgttgtatgctgtttaattggtatcgtattccggctctgtactgccctccgggggcgtttccggggtggtaggctcggtagcggcaggctcctccggggtggtagtgatctgcacactggggtctgcggcgatatacacggtgatcaccgtacccaccgtgaccatagcgccctcttcctcgctggcagagaccacacagcccgtagcgtaggagccatcgttcactaccataaagcagctggccacaagcccccggctgctcaggatctcaatggccttatcctgcgatgcaccgatgatcttgggcatctccaccttctccgggccctgactgaccacgatctggatcacctcgccgttctccatcacctcgccggcctccggctcctgccggatgacctgcccagaaggcacggtatcgctgtactccagcaccgcccggaacaggtacatactggtgtactcgcggttattcttgatttgttcgtagtcaatgcccacaaagttgggcacaaggttctggggcttcatttcctcgctgctggcagcttccgagctcggctccgaagagggagtttgttcctccttgctgctcacgatgccccacagggtgagcaagatcaaaacggaaagcaggatcaggatgcccgccagcaaccccttcaaactgagcagatgttccctgctctgcgcgctctgctctgcccgcaccggatgcatcggggtctccggcttcatggtgcgggtcagctcggcggtatattccttggaagaaagcgcctgatacagctgcggcacggtctggatgcgctccatgaccttgagccgcagccccagctgcaatacatcggagacataggccggtacggcaggctctacggtgcgtgcccgggggttagagtccgacaccacacgctgggcagcgggcatgggtgcctgcccgcacaccatgcggtaaaagacggcggcaaggctgtattcgtcggtgtagcgcccctcaaactcggcggtggtgtactgctccggcgcggagtaaccctcgtacagctgctcgtgcagaccgctgcctgcggtgcgcagacccacggtggcgtacccggccagacggcagcggccatccgacatcacccggatattctccgggcagatgccgcggtgcaccagccccgccttgtgcatggccgccacgccctcaaacaccgggcgcagcatggcgcaggcatcctctgcctgcaccggagcgggacgattttccagccattgctccagcggggtgccgcctaagttttccagcaccgcatacacggtgttgttggcttccaccacatccagcacagcctccagaccgctggcgggggtaatgcgctggacggcgcggtacaggtctgcaaagtccatgcgggtggtcttgaacagcacttcgctgccctgcttggggcgcaggatgcagtccgccccgcgctccgcagaaagggtgacgggcaggtactccttgatggtcacccggaaagcgcccagattctccacgccgctgtacagcacaccctcgccgtccagactgcgcatctcgcccacggtgtagcgcccggccagcaccgtgcccaccggcaggcagcccgccgggttgcatccctctaagatcttcccgcaatggggacagacggtcgccgcaggcggcagttcccccatgcagaacggacacaggcgtttttgctccatagtgttctctccccttccaagcttctatacactttattgtatcatagtgttccccgccgtgcaagctgtccgcattttggtgcaaaagcaaaaaagaccggggcccgcagcccaaagggctgacaggctccggtcttatagatgcaaggggttttcccttatgctgcgcttagtggatgaacacagggcccagcgggtttgcaatgggacttacatagccgcccagcagcttggggatagcaaggctgatgtcggggatgtaggtcagcagcagcagtgcaatgaacatgcacaggtagaacggcagggttgccttgactaccttctccatgggacgctttgcaacggcagagccgatgaacagaacggagccaacgggaggagtcagcagaccgatgccgcagttcagaaccacgatgataccgaactggatgggatcgatgccgatggaggtggcgatgggcagcaggatgggggtagcgatcaggatgatgggagccatatccatgatcatgcccagcaccagcaggatcaggtcgatgagcaatgcaatgatgtaggggttatcggtgaggtcggtgatggcggttgctgccagatcaggcacatgcagcatggtcaggcagttgccgaacactgcagaggtagcgatcaggatcagcacgatggacagggtgttgacgcactcgtccagagcgtgccacacgcccttccagtccagacccttatagacgaacacggaaacgagcagagagtagataacggcgatagcagcggactcggtagcggtaaacacaccgccgacaacgccgaacaccacgatgatgacagcggccagtgcccagatggaagtgcccagctgcttgacaaaagccttgatgctgaagggatcacccttggggtagttgcgcttgaccgagatgatgtaggagccgatcatcagcacgatagccagcagagcgccgggcaggtaaccggctaggaacaggctgcccacggagataccaccggcggtggtagcgtagatgaccatgttatggctgggaggaaccagcagaccctcgcaggaagaggtaatagtaacagcggtggagaagtctgcgccgtagccctgatccaccatcatggggatcatgatagaaccgatggaagcggtatcggcggaagcagaaccggaaatgccgccgaagaagtaggaagccacgatgttgaccatggccatgccgccgcgcatccagcccacgcaggcgtcagccagtgcgatcagcttttcagagatgccgccggagcccatgagcacgcccatggtgataaagaacggcacagccatcaggctaaaggaggagatgcccttgaccatcaggcggcagacgtcggtcagtgcctgaccctgcaccagcatgcacagcacgctggacagaccaacggcgtatgcaatggggaagcgcaggaagatcataacaaagaagctgacaagaaggacaatgattgccagtgtctgaactgtcatattacatttcctcctttacaaaaaagctcttgatatggttatacagcgactcgatctcgaagatgatcatggcaacaccggccagcggcaccggaaagtacatccagaagcggctcagccaaggcatggaaacatagaagccacggccgcccagcgtggtggcgtagttccagccgaccgccatcatcaccacaccaaggatcatcacggccacgtcagacaggatgtccagcgccttgaccactttcttgggcaggtacatatcaaaggcagtcatgcggatgtgtgcgccgcggcggatggccagcgcagcgctcagcacagccatgtagctcatgcaggtcaaaacgacctcctcagaccaggaggggtccggaataaaggggacgtaacggccaatgaccgacatcgtggtaatgaggatatctgcgatcagcaggatcttgcagatgaacagaaccaccttgtaggtaaagtcgtacgccggtctgatcttatccagagtggtaaagattttcggcatagaaattcctccatataaaaacccggcgaagcctgcgggcgtattcccgtgggctcccgccgggcaatgtactacttagattggatggaaagccagcttatgccttcatgtccagcagcttctggtacagctcagcctgatcagaggtgttgtccttgatgaccttagcgcaagcttcctgccagggagtcttgtcgtccacatccacaacgttgcagccggaggagcgcagctcttccagaaccttgttctcagcggtctcagacagatcagcgttgaacttctgggtgtcggcagcagcagccataacggcagcctgctggttagcggtcagcttgccccatgcgttgtcggtgataacagcctgcacagcgcccagagtgtggccgtccaggatcaggttgttagcaacctcggggaaggcattggacttgtagtttgcgatgggctgctcagcgccatccacaacgccggtctgcagtgcgctgtacagctcgccgaatgcaacgacggtggggttagcgcccagaccctcgaccatgccgttcataacggggtcgttggacacacgcagcttcatgcccttcagatcatcgatggttgcaacgggcttgacggtgaagaagtgacggaagccctcctcgccgtagaacaggccgcgaacgggcaggcccagttcctggggctcgttcaggaactcaggagccagatcgctgttggcaaagttccagaagtgagcgcggttgttgaaggtgaaggggatggacagcagcttggacttattgcagccgtagctggtcagagcgaaagcagagatacggctgatatcaatggaggtagagccgcccagaatagcgtccagaacgtcgttctcagagcccagaacaccggaagcctgcacatcgacgaccacagaaccgccgctcagctcctcgaccttctccttgaagtgagaaccggtctggccaacgatggtatccagcgggttgacctcggcgtagaccagagtcaccttgggatcgttggcagcagctgctgcatcaccggcagcagcagaagcagaagctgcggtagaggtggaagcagcggtagaagtggagccgctcttggaaccaccgcaggcggtcagagcaacagcagcggtagctgcaccggcaacggccataaagctacgacgagagatcattttcataggaatcgtcctccttaaataattgtgaaattctccgggcgcacaggtgccggagctttcgttcattgactgtacacactttagcaaattttccgaaatgaaacaagagctttcgaaaaatgtcctatttttcgaaagaatgtcaagattgtttttggcacattgcacaatcgctttccgtcttgtttgtgcaacactactgaccagttggatacattcctgcattcatagcaaaaaacaacaccccgaaaaatgtccatccgggcacttctcggggtgtctttttcagcttttctgtatccggtcgatcagttcctgctgggcagagaagccatcgtacatgggctgtaccgctgcgcggaagcgggctttttcggcctcgtccagttcggtgacgcagatgccccgcttgcgcatattctgctctgcgttcgcctcccgccgtgcccagagctcccgctctgtctgtgcgctctcccgggcgcaggcacggatcacctccgggaagctctcgtccagcgcggcaagcttttccatcaccgccgggctggccagctgcacctccggcacccgggtgtgctcgtccttcaggaaaaagggtgccacctcgtagtgtcccatcacttcgtagctgggccagttgttctctgccccgtcgatctcggcattatgcagggcggcatacaccttgctgtacaccacctgcgccggctttgcgcccaacgcggtgatcatgtcgctcatcatgtccgactcctgcacccggatggtcagcccctgcaaatcatccagcccggtcaccttttcccgggtgtagaagctgcgcacaccggcatcgaaccacgaaagccccactaagtccatcccgtccagcatggccagaaactcatcgccgatgtcgccgtccagcacccgccacatctgctgggcatcgctgtacaggtagggcaactgcaatacgctgagttccggctcgtactctgccagctggctcagggacacgcgggaaaaatccaccccgccgaactgcatctgctggatgacgctctgctctgcgcccagctctgccccgctgtaaaccagcaccttcacccggccgcccgtgcgctgcgccacaagctcggcaaaggcctttgccgccttgctggtagggtagtcctccggctggttctccgcatagcgcaggatgagcggcttctcctgttgcgaagaagcagactgcgccgtacagcctgtaactgccagcgccggggctgccgcaagcagacgcagcagctgacggcgggtcacagccgcacctcccgggctgcctttgccgcttccttccggtactgggtgggggtcatgccggtgcgctttttaaaggcgcgggcaaagtagctggcgtcctcgtagcccaccatggaggccacctccgctgcggagcggaaggggtcggccagcagttctttagctgcgttgatgcgcagctcggtcagacagtccagaaaattcatcttctggtattttttgaactgcgccgaaaggtacgccgggctgatgtgcaaaatttcgctcacgctgtccagcgagaggtcggccatatagttatcttccatatacttgcgcacatggtccatcaccagtgcgttgcggtcgctctccccttccccggcgggctcggtctcctgctccggggcggtttccggctccggggcttccgcagccagttcggccagacggcgcccggcttcgatctgccggatagcgcggcggatggcggcctcggtctcgtccgggtccaccggcttcagcagatagtcgcaggcacccagatgcaccgcctcgtgggcgtactggaacaggctgtacgccgtgatgaagatcaccttgcactccggccgctgctccagcaccgcgcgggcggcatccaggccgttcatgcccggcatctcaatgtccatcaaaatcaggtctgcttcccagagcacggcggtatcggcggctttgcggccattttccgccatctccaccgtcacctcatgctcgaaccggcgcatgacgatatccgccagcgcctcccgctccatcctctcgtcatccgcgatcaacagacgaatcattcctcaaattcctcctcattctccaccagcggcagatacaggatcaccgcagttccccgccccggccgggagcgcaccaccacccggcagcgggcatccagcaaccgcaggcgggcggccacgttataaataccgatatgttcccagcggggtgcgggctgctccaatgccgtgcgcagctgctgcagctgctccggctcaatgcccacgccgttgtccagcacccggatgcacagcagacctttttcccgcaggggaatcatgcggatgcgcaccacgccgccctcttccttggggcagatgccgtgcttgaaagcgttttccacgataggttgcaagataaaggacggcaccatcgtctcggtcagatccagcgaatccgagaacgcccactccatctgcacccggtcgccaaagcgcacatggtagatggagtagtactcgtccacaacgcgcacctcccgggagaggggcacctgctcatcgttgctcatcaggctgtaacgcagcagatgggaaagcgccatgatgagcgcctgcgtgcggtaggcggactctgtgcccgccatctgctggatgacgttcagggtgttgaacaaaaaatgcgggtcgatctggctgcgcagctgctgtaaccgactgcgctccatgcggttctgcagttccagcgcctcggtcttttggcgatgcaactcccgctcgatctcgtttttctcctgtaaggtgctcacctgctgcgccatggagtgcttcatgcggttgaaggactccgccagctggccgatctccggctgcttgggcagcgggatatccggggtatcgaactggctacgactgatggcgcgggaggcctcgatcatctgagacaccggagtcagcagctgcatgaccatcagaccggaggcacagcccagcgccacgcacagtgccaccaccacgatctgcatcagggcgatccgctcgcccagctccgagatctcggtgtaagtagtctgggcatccagaatcgaggttttcagcagctgcatggtgtactggctcagatacccgccgcagaccgaaaccttgttgtagtacagctgggaagcctttgcttcctgcccactggaaagatagctctccagctcttccaaaagggtgttgtagctgccgtaggtggtctccaccgcaccgtacagcacccactgctcatcgctgacgttctgcaagccgtccatattggatcggatgcgccacagccatgcgttgctggtggagcaggccgcctgaagcttttccagcatttcctcagtctcgccgttctcccagcggtacgcttccagaatgctgatggagctttccacaccgccctgaaagcggctgatggcgttaaagttgcccatctggtcgtcctgcacctgctgcaccgcccgcgcctgatagccgttcagggcaagctgcaatgcaaaggccgcaaaaaatgctgccagacacagcaccatgcgctgcttgagcgtaacgatgtgcttccagttgcgcttttccatgcaaggcttcccccttttcgttaaggtgtatctgaaaacaaagaaaatgacgaatatttcgcaagcacaagcgggatttaaggcaaatagccgcaggaatcctttgtggatttcaaggctgattcacgcaaaatccagctgtgcttgtagaaatagactaaattttcgacttttcagatacaccccagataatatcttattttaccacgccttgcgggcggtttgcaagccggatgcaccgccgccgatgcatcttttgcttgcttcttgccggtaaatgtggtactatgcccaaaaaggagggtaactttatgacccagaatgtttgcgtttccgttcagatggacgaaaaaggctttcacgattttgcatcttttgacctgctgcgccacaacaagggctggcagcgtccggcggtgttcaccgccattctgctggtgtgtgccggcatctgcctgagccagatcggcaagcgggagggtgccgggctgctgaccgccgtgctggccatcgtagccatcggtctgcccgccgtatacttcggtaccttctttgccaacctctccaagcagatcaaaaagctgggtctgccccgtcccttctaccggctggaactggacgccgccgggctttcggtctggatggccggtgagcagaacaagaccgagcccaccaaccgctacacctggaacaccgtgtactgcgcctaccgcaccaaagaggcggtgtacatctacgtccagaagaatcaggcctatctgctgaacgagagcatggatgccgcatggagcctgctgggcagcgccctgcccgctgccagcctgcacgactgccggaaataagggcagcggaaaatctatttttcttttgaaatcccggagcgtctgcggacgctccgggattctatttttacataacaattttcacaaaacaaaaacccacgctgcggcaaagcaaaagcgcagcgtgggtcacggaaatagcgttataaagttttagcgggccagagtgtacttgtgcagggtcttgcgcactgcgccgttaccagcgtacagctccttgaccatgccctcgatcttttcgcccagaccgatggcgtacaggtccacgccgaacacgtcggcacggctgtacagagccttcaggcagctgaagtcctgctcgccttccttgacctccaaggggttgacgatggcctgcagctcagccagcagcggatcgggagagatctcgaagggctggccgttgtcgtcgatgcccttcaggtagcgggcatagcctgccagcaccagcgggatcagcacaaggttggacttgtccagaccgcgctcctcgtaagccttgatggtctcgccgaagcggatagccagcttctgagaggtatcggtagcgatacgctggggagcatcgggcataaaggggttgggcagacggcggttgatgacagcgccgatgaactcgtaggggttcagaacgccgggatcaaccacaacgggcatagcctcgatatagccgatcttctggatgaaggagcgcagatcctcgtctgccatctcggcagagatgaggttgtagcccagcatgcagccatagatggacatggcagtgtgcagggggttcaggcaggtgcagaccttcatcttctcgatcttgtccacggtctcgcggtcgcagtacagcacaccgcccagctccagtggaggacggccgttggtgtagtgatcctcaatgcacaggtactgggtctcctcggcgttgacgaagggagcggtgaaggtgtgcttctcggtcacgatggtgtagttgtcctcaaagccgtcctttgccagcatctcctgcacctttgcgtccgggcgcggggtgatcttatcgatcatgctccaggggaaggtgatcttggtctcgtcctgcacataggccaggaactcagcgggcaccagaccctgctccacccactttgcagcgtaggcgtggacggcagtcttgaccttatcgccgttgtgagagcagttatccatgctctgcacggtcaggggcagcttgccggccttgaagcgctcgtacagcagagcggtgaccttgcccatggccagcacgggggtcaggccgcgctccagatcagcgggagcaacgccgtagcccttctcggtgatggtaaaggagatcatctgcaggctggggttctggaagatctccaccagacgtgcccagtcggcaccgaaggagtagtcagccttcaggctctcggtaacggaagcgatgaccttcttctcgatctcgccggtggacttcaggcaaaccagcaggctcaggttatcgtagggctggtaagccttatcgatgatctcgtagtcgaagctttcagccacgatgacgccgcggtcgtacttgccgctgttcagtgcatcgttcagcacggcagcggggaaagcgcggaagatgttgcctgcgccgaagtgcacccaagtgggctcggcgtgggtcttggccttgacagcctcgatgtcgaatttgggcagctcgtagcccttttctgcccactcggcggacagattgccgtttttgatatcagacagcttcataatcatcagcccttcttttcttcatccagacggtccagcagatcccagatacccagcatatactggatgcccagagcacggtcatacttgccatagccggggcggcagacaccggggccttcctcccacagctgacggccgtggtcaggacggatgtagccctcaaagccgcagtcatggtaagcgcgcatcacctcaatgatgccggtctcgccgcagcagtcgcggtgcgcagcctcagagaagtcgccgttggggaagtggtggatgttgcggacgtggccgaaggcaatgcggtcgcagtgcttgcggatgatctcggcacagttattgttggggtttgcgttcaggctgccggtgcacagggtcaggcagttgtacggatcgtccaccatcttcaggaagcggtcgatgctgggctcgtccaccagcagacggggcaggccgaagatatcccaaggaggatcgtccatgtggatggccatcttgatgtcgcactcgtggcaggtgggcatcagagcctccaggaagtacttcaggttctcccacagcttctccttggtgacaggggcgtaggccttgaacagctcgtccagctttgccatgcgctccggctcccagccggggaaggtcatgttgtacttctcggtgaaggacatgatatactcggccatcgccttgtaatcgcccttgatcttgtccttctcgtagaacagtgcggtggagccatcgcctaccgggtggaacaggtcggtacgggtccagtcgaagatgggcatgaagttgtagcagatgaccttaacgccgaacttggacaggttgcggatgcactgcttgtagttctcgatatactggtcgcgggtgggcagaccgatcttgatatcgtcgtgcacattgacggactcgacaacatccatatcaaagccgtaggcgtggatctggtctgcaaccttctggatctcgtcgatttcccagatctcgccgggcatcttgttgtgcagtgcccagacgatgctggtcacgccggggatctgcttgatgtcgctcagggtgacggggtcgttgccctcgccataccagcgccaacccattttcataggcatagagaagttcctcctgtcgttatttatcttatggcacgcgcagtacgcctgcacgctcttcttgcttatattctaatatatcagttttaaaatagcaatacgcacaatgccgtttttttgtgtttattcttgtatactttacacaaaaacggcaaaatgccagttttttaacaaggtttttgggcagtgtgctgctctccttccaatcttctcctgttcctccggctggtgcagctttttgaccggtttgcgcaaaaatatgtcctgcttccgttaaaagtccgttctgtggtacatttgccctgttatactgcaattacaccgagggacggcagcgtctccctcatctactggaaaaaagaggcatactatggacgaaagcaactttgtggtaaagaccatcttccacgcccgcggcagctccgaggtacttaccgaaaactattttgccacccggaaggaggcagaggaattctgcgccctgaccgactatgccatgaagctgaactacggcgcagagcagcagctggtgaccaccgagatcgtggcgctctgacccgcccggcgcaaagcgcagccagttgacaattcctgtaaaaacctttatattcaagacacgcagcgctccgcaaaaaccgccgggcgcatcatctgcttttacttttatatataaaggaggatccgctatggtttcacctgccaagtgcattgccgggcgttctgttgccgattggattgcggcataccccgtagtctccgatctctgcgccctgaaggaaactgcatgggtaaacccggacaagctgccctttgcacaagctgtggccgcctgcccgctgactttggccgacattgaggacgccgccgcacggctggagcggtttgcgccctatcttgccgccgtctttcccgagaccgctgcggcgggcggcatcatcgagtcccctgttcagcccatcccccggatgcaaaaagtgctggaggagcgcagtggcactcatatcgccgggcaggtatggatcaagttggacagtcacctgcctatttccggctccatcaaggcgcggggcggcatttacgaggtgctgaaaaccgccgaagacattgccctgcacagcgggatgctgcactttaccgacaactacgccgttctggcagaggaacgcttccgcaagctgttctcgcagtattccattgcggtgggctccaccggcaatctggggctttccattggcatcatgagcgcgaagctgggctttcaggtcactgtgcatatgtccgctgacgcgcggcagtggaaaaaagacctgctccgcagccggggcgtcaaggtagtggagtacgcctctgattacagcatcgccgtgaccgagggtcgcaagctggcggcgggcgacccctactgccattttgtggatgacgaaaactccaagaccctctttctgggctatgctgtggctgcactgcggctgaaaaagcagctggacgcgcagggcgtcaccgtggatgcggagcatcccctcttcgcctatctgccctgcggcgtgggcggtggccccggcggcgtggcctttggcctgaagctgctgttcggcgatgccgcacactgcttcttcgccgagcccacccactccccctgcatgatgctgggcatggccaccggcgaaaacaacagcatttgcgtgcaggactttggcatcgataaccgcaccgccgccgatggtcttgccgtggggcgcgcctccggctttgtgggcgggctgatgcgcccctttatgagcggctgctacaccctgcaggacgagcggatgtatacccttctggcacaactggcagacgccgaagagcttttccttgagcccagtgctctggcgggaatgtacggcccggtgctcacccagcccgggcagctgcttggcgcttacaccgaaaccgccctgcccgccggtgcgctggcaaacgccacccatctggtctgggccaccggcgggaatatggtcccccgggaagaaatgcagcgctactacgcaaaaggcaaggcgctggcacaggggtgaccgtgtgtcatgtttcgattgccggtcgcatattgacatttttacaagcgtacgctatactgtacacaaaaggagtgattctacgatgaccactacaaatatcacgaatttccgtaagaatgccttcgactatgtagagcagaccattaaatacaaccagcccatcaacatcaccaccaaggacggcaatgccgtgctgctgtctgaagaagattacagcggcatcatggaaacgctgtatctggtctctgcaccgggtatgcgcgaaaagatcatggacggaatcgccacgccgcttgaggactgtgtggacgaaacggcggtggagtggtaaatgtacaaggtcgtttacaccaaaaccgccgcaaaggacgtgccaaaactgaggtctgcccatctggacgaaaaggcaaaggcactcattgaaatcatccgtgttgatcctttccaaaacccgcccccgtacgaaaagctggtgggtgatctgaacggtgcatacagccgccgcatcaacatccagcaccgccttgtttatcaggtctatgaaaaagagcagaccgttaagatcctcagtctgtggacgcactatgaacgataaatctaatagcacttcttcggaaaatccatcatacgatgaggatatgcgtgcagagtacgatttttctgatgccagaaggaacccttatccgcacgacatacaaaaataacaagcaaaagccgcctttcgtgccaaccagcacaaaaagcggctttttatcgtcttatttcaggagcaaagagacttacggaagcttattccggcagatcctcttcgttctcgagagagtgccagacgttctggacgtcatcgttatcttccagagaatccagcagcttgcccatctgcttcagctgatcgggatcggtcaggcgggtggtggtcatgggcaccatggccagatcgtcggacaggatctcgtagcccttctcctccagagccttgacaacagcggagtaattctcgggatcggtggtgacctcggctgcatcctcgctggcatcaaagtcctcggcaccggcatccagagcgtccatcatggcctcgtcggcgtccttatcctccagagaaatgtcgatgacacccttctggttgaacaggaaggccacgcatcccatagcgcccagattgccgccgttcttatcgaagtagtggcgcaggtcggcagcggtacggttgcggttgtcggtcagggtctccaccatgacagccacgccgccggggccgtagccttcgtaggtgatggcctcgaactcggtcttgtcgccgccctcagccttcttgatgatacgctggatgttatcgttgggcacgctcatgcgctttgccttggcgatcaggtctgccagcttgctgttggaagccgggttggggccgccgtcacggacggcaacgctgatctcgcggccgatcttggtaaagaccttggcgcgggcgccgtcagtcttttccttcttgcgcttaatgttgttccatttgctatgtccagacatgggaaagagcctcctaaatttatcggtatctccgcctgcgggcagacgggctgtggtcgcccgcttgtggcagcacacaaaatctaactctgttattttatcacaatccaccggcgcgttcaagcctgaaaagcccgattttcgcccggatgcgtgtaaatctgcggtttacagcagccgcagcgccttggggtagtggtttttcacccgcccgccggacaccttgccgccgcccagcggccagccgtccacggtcacacagcaccagccgtccgctgccgtgcgggcttccacctcgcggccggagaggtactcggtgcagcggcagtcggcaagggtcagctgctcgcagttcgtgcacaggctgccaaaggccgtgaacaggtggtgctccggcacaaagcggcccttctgcacgctgcccacgaacacccccgcccgcagcacatgaagtcccgtctgcggaaaggccaccggcagcaacacaccaccgccgtgcaccacggccgggcgctgcgccagcgcggggaaatactgccgggcaaactcctgccatgcggcaaggctctgcgccggggtggcctcccctgccccggtatcccgggtgcggcggctcgtgccctgcacggcgtcccggcaggcgcgactgtctgcgcggcgggcgctgcgggcatctgcggccttggcaggcttcgccttgcccttgccctttttgcccgcctcggcagcggcggcaagccagagctgctcctccggggtgtattctccctccggcggcagggtgcggggcgtaccggccttgaccagccgggccataaagtgcccttcgccgccctggcagggccagatgcggcgcaccttgctcacatccagcggcagaccgccggtgcggttctcttcgcctgcgctgccaaaggtgtaatccacgttgcccagcacatctgccaatgcaaactccgggtggcgctgcaaaaaggccgccacctgtccttcgtcctcctccggcgcaaaggtgcaggtggagtacaccagctgcccgccgggagccagtgctgctgcggcgcagtccagaatctgcgcgcccagctctgcgcactgctttaccagtgcctcgcagtgctgctgcagtgctaccggctccttgcggaacattccctcaccggagcaaggcgcgtccaccagcacccggtcgaaaaactccggcagcgcctcggcaatgcgggcgggggtctcgttgagcaccacggcgttggaaacgcccatgcgctcaaggttgctttttaaaatttcggcacgcgcagccacatactcgttgctcaccagcataccgcgcccctgcaatgccgccgccagctggctgcttttgccgccgggcgcggcgcacagatccagcacccgcatccccggctgtacccccagcagcggtgctgccgaagaagccgagggctcctgcgaatagaacacccccgcatggtggtacggatgccgtccgggcttaaaatccggctgatgcaccacaaaagccgccttgcagaagggcgagggttccagcggaaaatccgccctctgcgcaaactgctccggtgtggtgcgcagcgccgacacggtgaccccgcgctctgccgtctgctgcggggcggcatacagctgctcgtaccgctggcccagcagggcacgttcccgctgctcaaaatattccgtaggcatattcttttcctcccatgggatgtataaagccgccggctgcggccacactatggactgtgagggcggccccgcccccacagcaacgaccgaaaggagcattcacaccatggaaaaccgcagtgagaaccgcagtaccaattgcaagaaccagacctctaaccgtaccagcagcaagaccaccaacagcgctaccaacgagcacaagcaccccaaccagtacaccaagggtgccgatgacgagagcgccaagaactccaccaacagccgttccaccaacgcaaaaaacagccgctgatggcgtaagcggcatctgacggaccgcagatgccaacaagcaaagcccgctgccctccaccactggtttccagtgcggaaagcagcgggctttcgcattcttatttctggtcagggtcaaactgctgccacagcacctcaaacagctggtgcacacgctccagttgtccgttcaggtacagccatcccaacaggcactcgaagccggtggaggcacggtattcctccggggaggcgtgcttggcaacgctggccttgctggcgttgcggccgcgcttgaacacagccagctcgtcctcggtgaacagcggctccagcagctgttcctctctgaactgcgccttggcagagacatacttgaccttttcggcattcagctttccggcggaaaggcggtggtgctccaccagacgctgacgcaccagcagctccagcacgctgtcccccacaaaggccagcgccagcgggctgagctcccgcgggtcgatcttttctgattcgttcatgatgctttatccttagaagatatagtcgaactgataatcgccgatgaggatggtatcgttctcttccacgcccttctgcaccagcgcgtccagaatgccgctttcgcccagctgacgctggaagaactgcaggctctcgtagtcgtccacgttgctgccggccagaatatactccagccacggggcatccacgctccacacatgggcttccatgcgctggatggtgaaatcgcggccattcttcttgggctcctgctttttgtactcgggggtgaacaccggcacctgcgggatatccttgaggcggttgtacacgagccccggcagctgctttacgccctgcatggtggcggcagagatggccacgaaggtcagccccttgccctccacatactggcggaaggtctcgatctgctcctcggtggcaaggtcgcacttgttgcccaccacgatctgcgggcgctcggccagcacggggctgaactttgccagctcctcgttgatcttctcaaagtcctcgatggggtcgcggcactcgctgccggaaacatccacaacgtgcagcagcaggcggcagcgctccacatggcgcaggaaatcgtgtcccagaccgacgccctcgctggcaccctcgatcaggccgggaatgtcggcgcagacaaagcttgcgccctcacccaccgacacaacgcccagcgtgggcacaagggtggtaaagtggtagttggcgatcttgggctttgccgcactgatggtggagatgagggtggacttacccacgttggggaagccaatcagacccacgtccgcaatcaacttcagctccaaggtcacctgcagatcctcgccgggcataccgggctttgcaaacttggggatctggcgggtgggggtggcaaaatgtgcgttgccgtagccgccgcgaccgcccttagcaatggtgaccggggtgtggtcggacaggtctgcgataacaagaccgctctctgcgtccttgatcacggtgcccagcggcaccttgatgaccagattttcggcatttttgccgtggcacaggcttgcaccgcccttgccgccctccggcgctgcatacttgcgcttatagcggaaatccatcagggtggacagatgatcgtccgccacaaagatgatgtcgccgccccggccgccgtcgccgccgtccgggccgcctgcggccacgaatttttcgcggtggaagctcaccgcaccatcgccgcccttgcccgcatggagccatatcgtggcgatgtcgataaagttagtctgtgctgccatacagcccctccttagctttataggcctttgcgtttcagcgccctcatccggcacttcgtgctaccttcccccgaccgggggaaggcttgcaaacagcgctacacgaacgcatagccttatttcatcaaaaagagccgggccacgagggtccggctctacgattgcagttattcagaaagaagttactgcttaacgctgcacttcttgccgctcttgcccacgcgctcgaaacggacggtgccgtccaccagagcaaacagggtatcatcgctgcccttgccaacgttctcacccggcatgatgtgggtgccacgctgacgaaccaggatgttgccggccagaacgaactgaccgtctgcacgcttggtgcccagacgctgtgctgcggaatcgcggccgttcttggtgctgcctacgccctttttatgtgccattgtaatttacctccttagccgttgatcgcagtgatctcaaccttggtgtagggctgacgatggcccatacggcgagcactgtgcttctttgcgcgataggtgatgatgttcagcttcttgcccttgccattcttgatgaccttggcagaaacggtagcaccctcaacaacaggagcgccaaccttcacagaaccctcctcgccaatagcgagaacctgatcaaacttcacttcagagtcggcctcaacgtccagcttttcgatgtagacgatgtcgccctgctccacgcggtactgcttaccgccggtaacaatgattgcgtacattttgttcattccttttcgttgtactcgctggtcgtaaaggcagacccttactgcgggccatttcaggcgcccacaccatgcggctagaatattatagcaaaaacccaaccggattgcaagaggaaatttccccttttgcgcaaattttttacgcttttttctgcccggcctgttctatggcggcctttacctgcgcattataggcctcggtcttttccaaaaacagcttgcgcgggctggaagccagcagctgggtgtccttacccgcaaaggcaatggggccgtccagctttttttgagccgccttattctcagcgttcagcgccagcggcacaaacaggggcttgtccttgagcttgcgggtaaagtacacctctgccgcaatgcccgccaccacggcgatgcctgccaccagctgagatgcacgcagcccaatggagggcaccagcatcaggctgtcagtgcgcagaccctcgatccagaaacggcctgcgccgtaccagatcagataccgcagggtgatgtcgccgttgaacttgcgttttttgatgtagcggaacagcaggaaaaagcccacaaagcaccagatgctctcgtacaaaaaggtggggtgcaccggcaggttggggtcgatgaccacacccttgggtaccgtgaccgtgctgctcatcaggtaagcacgggtagcctcgctgtacatcccccacggcagggtggtgttgcagccaaaggcctcctgattgaaaaagttgccccagcggccgcagccctgcccgaggagaaagcccatagcagtcaggtcgaacatgggcagcaccggaacgccccgccacttacaggccaggccgccgaacagaaagccgccgatgatgccgccgtagatggcaaggccgccatcgcggatggcgatcatctcccagatgctctcatatttaaaaggtgccatagctacatagtaggcgcgggcgctgatgatgcccagcactacgccaataaggatgacgtccaccatgctgtccgggtctacgccaaattccagactgtgccggaaggcaaagcccagcgccagacacagacccaccgcaatgcacacgccgtaccagtagatgctgaccccgccgatggtaaaggccacgcggttcaagtgaaaactcagtcccagacccgggaactgtaccagatttgtcattcttcttcctcctcgtcctcttctgccgcctgcgccgtgccatccggcaggatgtacatggtagccatgcggtcagtgcacaggatgtgctgcaaagcagcgtccgcatcctctgcggtcagcccggccagcatggagatctgctgcgccaccgtctggccgctgagggcaaagtctgccatctggctggccgagtcttccacgttttccagattttcgatcagctggccgtatttttcgttcttgcacagggtaaacacttccctgtccacaccggcggcgcgtacctgggcgatctcgtccagcagcagctgccgcacagtatccggtacatcgctctctccggtgaacaggatgcagcagcagccgtccacccgcagcacctcgccgccaaagccggggttcacaaggccttcgtcatacaggcggcggtacagcggcgacatcccgcccacgatgcagctgagcacaaggtcgtacagcgcctcggtgcgcagatcgtccgcagacagcggctcttccttaaagcctacgccgaagcagggcttggagaccggcatggtcagcgttttttccgtagcggcaagggtcatgggctccgtggcccacagccgctgcaccttctgtgccgggcggggctccatcaggccgtgccgcttgcaggcggcaagaatctgttccatagtggtgttgccggccgcagccagcaccatattgcccggggcataaaaagccttgcagctgtcgtacagcatggcgggcgtgatctcggcaatgctctccaccgtgcccgcgatgtcgctgcggatggggtggctgtggtacaggcactcgaacaggccggtgatgagccgccagtccgggctgtcatcgtacattttgatttcctgcccgatgatgccctgctccttggcgatggtctgctcggtaaagtaggggtggcctaccatgcccagcagcacgtccaagctttcgtccaactgctgggtggcggtgaacaggtagcaggtgcggtcaaagctggtaaaggcgttggcgttggcaccggtctttgcgtacttggcaaaggcatcgccgtcctcgtcctcgaacattttgtgctccagaaaatgcgccacacccgccggcagatgcaccgtttgcccgttcaggcagaaatcccggtcgatggaaccgaactttgtggcatagatcacatgggtgctggaatagcccggcatggggcgcaccagcaccgtcaggccggagggcagggtctgccactggtcggccacggtcttttccagcagggtctggttattctgcggcatgggcagcatcctcctttgtaagcagatagctgaccgagagggtcaggcggcgcaggatatcccgcacctcgtctttggtcacggcgcgtagagcattccgcgcctgctccgggctctggatgggtgcagcgctgttggcaccggcgcgcagcacctcgatgtagtaccagctctcgatgccgccaaggctgtcctctaccccgttcatgccgctgagcaagccccggcggcagtcctcaaattcctcgtcggtgatagggccggcgcacaggtctgcaagttccttcaaaattgcctgctctgcgcgggcggcatcagcgtgctccacaccgctgttcaccgccatgctgccggtaaagctttggaaggaggaggagcagtagtagcacagatggtcccgctcccgcacgttgaggaacaggcggctggtcacactgccgccgtacagcgccatggcaaggcgcaccgctgccagctgctgcggctgcatgggctgccccagcgtgaacagcatacacagctttgcctgcaccatatcgtagttttcggtcttgtgcaccggtgcaatggtgggcatggccatgttttccaccagcggcagcggggcgcggtcgatgcaggcaagctctgccagcaaagcatcccggatggcggcggtctgggcagcatcacagcccagcaccagcagctcaatgttggcggtgcgcagcatctgctgataagcggcggtcagcatggccggggtaaggccgtccacctcttccagatagccctcctgccgcacacctgccggactgtcaccaaaaaactcccggttggcctgatgcaggcagtagatacgtttatcgttgatttcatcctcaaggccttttttcagcatctgcttttcaatgctgacggcctgcgggtcaaagcagccgtccacaagatagggatggaaggccgcacccagcgcgattttcgtgtactcggcggtcagcgcctcgccctccagcgcaaaggcatccttgatgccggtcacactgacgcagaggttgtggttgcagcccatggggcgggcgtccacggtcaggtctgcgccgtagagctttgccagctttttggtgaggcgggtcatgtccgggcagtccgcatagccgcgctccatcaccagcggcaaaagcgcatgggcagtggccgttttacgctgggccgggaaagcaaagtggatgctgatgcggcagcggttgaatttagaagccgggtcgcaggaaagatgcacgcccggtgcaatgagagtacgttccaatgatagttcccttctctctgtgccgcagcacagagcatttgattcagtctgccctctgcagggcgatgaactcttccaggctcaggccgctggcgcggatggcaagggcgttttccacccctacatagcgccagtgccacggctcgaacacgatgccggtggcggcctgccggtcctgcgggtagcgcaggataaagccgtattccgccgcgtaggccgtaagccactcgtaggcgcgggtctcggcaaaacgggtgtcctgctgcggattgtccgcgctgaggatatctgccgcgtagccggtgccgtgctcgttggcgttggcggcgggctggatggtagccgccagacgggcggcttcctcctcggacttgcgcttatcgcggtaggtctgcacccgggcctcgtaggcggcctgacgggtgtcggcgtcctgataaccggccacaagggtcaggctgaccccatccgcctgcgcggcggcggccatgctgcggtactgcatggcggcttcggcctccagctgctggccagtggcctcgtcggcggtatccagcagcggggcaggctcggcggtatagggcaggttggcattcaccagtatcagccgggcatctgcggcgttaaatacatagtctgtgccgtcgtacacgctggctgcaaatacctttggcccggccagcaggccgtgcaccttgggcagcagccacaggatgccgccggtcagcagcgccaccaccgccgcgcagccggccagaaacagcacccagttgcgggccagccgcagcattttgcggcgcttccattgttgataggtcaggcgcttctcagcaggcgctctggaggtacgggtgggttcactcatgcggcggggctccttttcggcattgttgcagcgccggtgcgccgcacagattcaaactatattatacacccctttgcaatttgtgtaaacgccgccgtgtgtaaaaaaattatgacccgcccgccccccggtagggagcagacaggccataattaaaaattttacgcagatcagtcaaacagcatatcgtggatggcgccgacagccttgtcggcgtctgcacggtcgatgatgcaggagatcttgatctcgctggtggagatcattttgatgttgatattgttgttggacattgcctcgaacatcttggaggcaacgccgctgtggctctgcataccggcacccacgatggagaccttggcgcaggtggtgtccacactgacatcgttgaagtgtgcactttccttcagcacacgcatggccagctcggcttcgccttcggaacaggtaaagctgatgtccttcttgccgtcgcggccggtggactgcaaaatgatgtccacgttgatgttcttctgtgccagcaggccgaagatcctaaagctcatgcccggctcatcgggaacgttgagaatcgtgataacggcaacatcggtgtccttggcgacacccttgatcagcataccttccatgtcctttgtaacctccttaaccaccgtacccgggatggggttcaggctggagagcacctccagctccacattgtactttttagccagctccacgctgcggttgttcagcacctgtgcgcccagagatgccagttccagcatctcgtcaaatgtgatctcctccagcttacgggtgttgctcactttgcgcgggtcggcggtataaacgccctccacatccgtgtagatctggcagcggtcagcgtgcagggcagcggcaatcgccacagcactggtgtcggagccgccgcgtcccagagtggtgatgtcatccagcttgttcaagccctggaagcctgccaccaccaccacacggttgcgctccagctcggaggagatccgctcggtctccagccgggtgatgcgtgccttggtgtaggcacggtcggtgcggaagcccgcctgccagccggtcaggctgatggcatggcagcccagctcgttcagcgccatggccagcagtgcgatgctgatctgctcgccggaggccagcagcatatccatctcacgcgccgaggggttatgggtgatctcccctgccttggcgatcaggtcatcggtggtgtcgccctgtgcggagactaccaccactacgtcattgcccgcgttgtgggtgttggccacgatccgcgcaacgttgaagatacggtcacggtcctttacggaagaaccgccgaatttctgtacgatcaacgccatatcttgtcactctcctctttaacgccccgcgcttgcgggggcttgccgggcggaagcgttcttgcacttcccttacccatttatcattccacggttgcgccggtgttatcggcatccagctgcaacagtgtaaatgcttcacatccgtccagaccttccagcagctccagacctttttccagcttggaatagaacttttcggcctcggccttttctgccacagccatgaccgtgctgcctgcaccggacacatacacggcctttgcgccgcacagccgcgccatgtcgaacacctcgcgggagccgggcatcaggggcatgcgatactgctggtgcagcttatcctcggtggcaatggccagcaggtcgtgccgcccctcgcagaaggctgcaggcaccagcgccgcacgcgacaggttatacaccgcgtccttatgggatacctctttaggcagggctgcgcgggctgcctcggtcagcagcttgtagtccggcacgatggcagcaaagcagaggctttcatccacattccgcttgactgaatacaccttgccgtcctcgaacacgctgctggtcaggccgcccagcagggccggagccacgttatcggggtgtccctcaatggcagttgccagcgtgagcagctcctgcgtgttgagcacatcgcccaacatccggtttgcgcccagcagacccgcgatgatgcaggccgaagaagagcccagaccccgtgccatggggatggggttcgtctgggtgatcttaaggggcgggatctgcttgccaaccttttcgaacagacccttggcggagcggtacacgagattcgactcgccccgggggatgcgggtgccgtccgatgccgatatctccagcacctcgctatcctcaaaggtgaccgtgttgtacaacgtaactgccagacccagcgcatcgaagccggagcctacgttagcgctggtggcaggaaccgaaaccttgatcttcattgccgcagttcctttccgttacacttcctcgggcagacgcttgagcaccagcttcacgctgccgcccacggcctccaccttgcgcgcggcctctgccagcgcacgctcatcggcgcgcttcacaaagtaggcgcagccctcgtaccgctcatccaccaccttgccgtagccgtagatggcttccaccacagcgggtgcaatgcccgccacacgcacataatatgcagcaggagccgggtcggtgagcatgccgtccaccgggtccgcaggctgccagaacaggctgtcgtgcacctgtgcgccgtttttcagcgcatccaccacgtctgccaccacagcgctggcggtgggcagcttgcctgcgcccttgccgtagaacaccacatcgcccagcatatcgcccttgaccagcaccgcgttgaacacatcgtccacgctggccagctggtttgccttgggcaccagacacggctctacaccggcggccacgctgccgtccttgccaagcttcatccatgcaatcagcttgataacgcagcccagcttttcggcgctggccacatcggcggcggtaatggcgcggatgccccgggtggggatgttctgggggtagatctggtggccgcacaccatggaggacaggatggcgatcttgcggcaggcgtcgcggccgtccacgtcatcgctgggatccttggtctctgcgtaacccagctcctgcgcaatttgcagcgcatcctcaaagcccagtccctcccgcaccatcttggtgagcatgaagttggtggtaccgttcacgatgccctccacctcggtgatgacgttggccgccaggcactggtgcatgggggtgatgatgggcgtaccgccgcccacagaggcctcgaacaggaaagcacagtcgtgctccttggccagtgccagcagctctgcaccgtaggtggccaccatctccttgttagaggtgcacacgctgcggccgctctccagacacgccttgacgtaggggtaagcaaagcgggtaccgccgatggtctccaccaccacccggatctccgggtcctgcaggatcacgtcgatattcttgaccaccaagggctccaccgggttgccggtaaaatccttcgggtccagaatatattttacctccaccggttcgccagcccggcgggagacgcttgcagcattgtggcacagcacctcgtatacgccactgcccaccgtgccaaagcccagaattgcaattttagccatactctctttccctcgtttcctgttttgttacaggttatacccacagcgcacactcaccaccatgcgctggcgcgaaagcttttcggtcagttcctccggggacatctgcatggtatcggtgcggatggtgaccgccaccagcgcagccccattctccggggtggactggttgatggtcacaatgctggcacctgcggcgctgatgccggccagaaggctttgcagcgcgccggtctcgtcccgcagggtggccatgaccgtgatgacctcacggccgttctctgaatcaaagatacaatccttatacttataaaatgcactgcgcgaaagctctacggcgcgggtcgcagccgaaatgctgcgggcttcgccgctggccagcagctccttggcgcgtaccaccttgagaaaaacctccggcagcacctgcgcatccaccagataaaaacggcgttccaacttgttcacctctcaaacacaagtgttcttgcagaaaatataatagcatccgaacccctgcaatgcaagagcccggatgctattttgtcactttgtccagttttgtcttgtgaagtgcgccctgtccttgccggatttttcagcaaaggggtgaaaaagtacgatttttgtccttattccgtgtccagtgcgctggtatcggtggggatgaccggctgggtgggcgcagcatcgtctgtgttctcggcaggggcagcagcctgcggtgcggcatgggaataggtgcaggtatcgggcaggtcatcggcacggtagtagcccacggcagtgctcgggcagcctgcaccggccagcaatccgctctgggtgcagtaacggcgctccaccacgcctgcggaggtggggaatgccttatagggcaggtctgcctgtgcctgctccatcagtgccttccacgccataacacaggtgcgggtcttggcctgctgcttggacagagtcttggtcatatcgtaaggtgcatcatatccccaccacacagcggtgacatagtagggcgtgccgcccacgaaccacaaatccttttcgtcgctggcagtaccggtcttaccaaaggcctccatgccgttggagttggggtagcggccgctggcagtacctacgctggagaacagaacgttcttcagcagacggttcatgacataagcggtatcgggggtcagtgcctgatagctggtggcgttgttttccagatagatgttgccgtcccggtccagcacacgggtatacaggtgcggggtggtgtactcgccatcatagaagatctggaaggccgcggccagtgccatgggggtaacgcccttggtttggctgcccatgaccatctgcgccagacccacatcgttggtggggtccagcgtattcagctgcagggtgttgtagacgaagttgaagatattgcttgcgcccacaaggtcgcccacgcggactgcgatggtattcagcgagcgggcaaggccgttccacagcgggagatcgctgccatcgccgtagttgccgccgtagttgcgcggccagctgcgccatgcgttggggtaagcgcggagctgcttgtcggagagccccatcaggccgttcttgcggcagtagtcctcgtcccggatgatcatatcctgcttctggtacaggggggagttgttgagcatggtggaccagttgaccagaccgtactcaatgcccagtgcataggcgccgatgggcttgatggtagagcctgtctgccgttccacgttgtaagcacggttcagggcaaggctcttggtcttttcgcccaagccgcccgcaatggccagcacgttgccgtcatagtccagtgtgaccatagcagcctgcgtgcgcacgttgcggtaatagtagacggtgccatcttcgccggtgcgggtcttgggggtaccgtcctcgttgaacacctgcacatcatcgtccgaaatagaggtgacctcttcctcatgccagcccgccgggaagtaggcatcgtcggtgttcagcatcaggttttccatctgggactgcagcttggtgttgacagtggcttcgatggtaaagccgccggtgtagagcagcttctgtgcctcggactcgctgatgccctccttggtcatgatgtcctgcacgacctcattgaacagtgcatcggtgaagtaggaggtgacggtgctgggctttttgccgctgtcttcttcggccagcacaaggggctgtgcagcgccgttgcggtagtcctcctcgctgatcacaccctgctgccacatattgtacatgatgaagttgcggcggtggatcagattttcggggttcgtataggggttatagttggtggggtttttggtaatagaggcaatggtagcgcactcccacaggctcagctggctgacgtccttgttgaagtactcgttggccgccgtctgcacaccctgaatggtgccggtaaagctgatggtgttcaggtacgcctccagaatggtctccttggagtagctgcggctcaggcagagggcgcggtagatctcgcgcaccttgcgcaatgcgccatcgataccgctggcgctgttgtcatcggtcaggttcttgatgagctgctgttccagtgtggatgcgccctgcttggagctgtaaatgggcagcagatactcgttgatcattgcgccgatggtgcgcttgaagttgacgccaggctctgagtagaagtccttatcctcggtgcagatgaaggcatactgcaaattggaggggatttgctcaaggtctgcccatacgcggtggctgttggaggagcgcagggtggcatactccacctgtgcgccggtatccgggtcggtagctaccaccatactggactggctcagttggatgttgtccaagtccagcaggtcaccgtcgttggcagtagcctgcaccacatagaacaccatgcccacggccaccacgctgcccagcatgatgccaaggcagagcaccgtagcgacggtgcggccaatgaaccgcaggatgggatgcttgctcttttcctttggcggcttggggcttttgggtgccttgggcgcgcgggtacggttttccgctgcggggcgtgcttcgcggcggctctgggaaacattgaccttacgtcccaccgggcgggcaggctgctcctcgccgccccggtggatctttctcatctcattgttggagatagggatcgcctcctgacatttcaagactgttgccgggcatagctgcaccgggctttatccacaacgtttgtgacacgaaatttcaaactgcaataccatattatagcacgcaagccccagccgggcaagaaccaatctttgcgcgctgagcagatataaatagtataacacactctcttgtggaaagtacagtatctgcgtgtgaaaattgtctgctatccgccaaaacggggcatacttaccggggaagggagtgttttttatgcgcaagctgtctgtctgcctgttctacgggctttgcgtattcaccattgtattcagtctgttctggatggcgctgccaaggctgccgctgtcccaaagccccgccgggtctgagaccgaccccgcctctcccctgagccttgccgcgcaggcagtgccccagacggacaccgcccgctactgcctgcaagacagcggcgggcgggtggcggtgtacacctgccgcgccgacggcaccccgggcaccctgatccgcgtgaccggcatctacagcaatcttctgcccgaaaacgacgccttacgcatcaagcgcgggctcgtggtcaacagcccccgggagctggacctgctgctggaggatctgggggaataaatgcaatgagccgctgcacgatatgcagcggctcattgcatttatatgattcaggcttccatttcttccagcggcacaaggtactccttgcggcactgctcgtactccagcatatagtccttgctggggttgtggtgcataatgcttttcagggtgtgggagtcgtagtcctcgccggcttccatgcccaccatgcgcactgcaatgttggagcagtggtcggagatacgctcagcgttgttcagcacatccaggaacaccacgccggtgtcgatggagcaaatgccgtccttcagacggcggatgtgctggtcgcgcagacgctccaccatcacgtcaatgatctcttccagcggctccacctgtgcagccttctgggtatcatcgttttcaaaggcctcgtccgtcagaaccagaatgcgttccaaagcggcatccagcaattgcagttcctttttggcactctcgctgaagctggcttccttgtcgtacagttcctcggccttttccatgatgttcacggcatagtcgccaatgcgctcgaactcggtaacaaagttcagcagctcggtcaccgcgtggctctcgtcgtcgcccagctcctgatcggtcagtttgatcaggtagttggtgatctccacctccatgcggtcgatcaggttctcgcgcaccttaatggcgctcacggtctcctcgtccatcttcaaaagcagcggcgcggccagacccacgttgcgggcggcgcggcgggacatcttgatcaccgcgttcttcgcctgctgcaaggccacagccgggctcttgtacagacgctcgtccagcaccggcatgctcagctcctgtgcttcctctacgctactgggcaccgtgagcatcgccaagcggctcagcactccgctgcaaggcaggaacagcagcatggcgcatacgctggacaaggtatggatgtttgcaatggagctcttgttcatcacatcgccccacatggggatgccgatggtgaactgcaccgcatagatcagcgccagcaggatcacactgccgatgacattgaagtacagatggatgagcgctgcccgcttaccatccttggaggagccgccgatggtgagcagcggggtgaacgccgtaccgatatgtgcacccagaatgatgggaatggcagaactaaaggtgacaagccctgtgctggacagtgcctgcagaatacccaccgaagcagaggaggactggatgatcacggtgaccaccacgcccaccagaacgcccagaatggggttggtcatggtgacgaacagattctgaaagacggcgctctcccgcaggggtgccacgccggtatccatcaggctcatgccggtaaacagaatgccgaagcccagcatgatctggccgatattcttctttttggcattgcgcaggaacacataaaaaatgcagccaataaacgccaccacgggggcaaaggtcttgggctggatcaaggtcagccacaggctgtcgcctgagatatccgccatgcggatcaactgacctgttaccgtagtaccaatatttgcacccatgatcacgcctaccgactgcgtcagtgtcatgataccggagttgaccagaccgacacaaataaccaccgtaccagccgacgactggatgacgccggtgatcagtgtgccgaagatcacgcctttgatggtagaggaggtaagcttttgcaatacgccctgcatcttgccgcctgccagcttttccagaccggcgcccatgatggacatgccgtacaggaacagcgcaacgccgcccagcagagaggtaatgtgtgtgatatccataacgatactcctaatatgaaacttcccttttaatcctttacagcacacagccgccggaacagggcacgcgcaacgcctgccctgttccggaagccgcttatttttattataccatcaaagggggcgtctcaacaaggtttattttacaggaaagttactttttttacacattccgcaacatatttccgggcggcaaacaaaaagatttccgttattttacatacattttacattcagctttcccagatgcgatatgccgccgcttacccggccagctcttccatggcctcccgcactgtgtcggccgaaaacaggaacacaccactgccggtgtatacctccacatgactgcccacataacgcaactcaaaatccttcatggtgtttccctcctgtgtttctgttttgttccggggctttcccggtgaacacagtatcgcataatttagataccataaaaaggactttcaaaggtttttgcggattttttgcgtaaaaaacagcgtatgctccccagtctgctcacgctgtacgcggccattttcctcggagatcaggtctttggcagtccccgcagcgccgcatttccgcaggaaacaggcgctggagctgccgttttccgtcacgaccccctcctgtgaaaatgggatagcggagcgtccgcagacgctccgctatcccgaaattaaaaataaattttccgctgataatggctagagcaaagcggaagcccttccaaatcatcctgctgtgcaaagcattattctgccgcgtccgtcacacggacggggtagcctgtccgcacacagcgcaccgcgtagcgggaaccgccgccggaggtgcaggtgaacagggtcagatcccagttgtccgtctcggtatcggtggtcatctcctcgatctgggtggggcgcaaagtctccacgctctccacctcatagctccagcgcagaccgtctgcatccgtaaaatagaccgagctgccgatggccagccacttgatggggctgaagtgcattgcgtagttgtggccgcagatcacaagatcatcgccataggtggtgccgctgtaccgcccgggggcgatcttcagcccggcgtagctccactgcgccatcaccggcagctcccgttctaccgccgggatggaaagcaccccgatgtagtcccgcccttccacctccacggtggtcatctcctgcgtcgggtccagcaccggctgcggggctgcagtctcgttttcctgctggtgctccgtaatggtcttttgcatggtctgctccagctcgcccaatacttcctgcgaagccttttctgcccgggcggcatcccaccggttgtagcccagcaacccggcggcgcataagatcagcaccgcgcccagcaccatgcacagcctgccgattttccgtttcattgcattccatcctttataaatagtatcatctgcttcagtataccattccccgctccggtttacaaccgttcttgcggtcgttttttatcgggcagcagcgcgcagaccagccgcaccatctgcccggtcaggggcagccacaccagcgcgcacagtacgttgaataaggtgtgtgcgttggcgatctgccgggcgatcacggcgcactccacccctgcgggcgagcacagccgcaccagcgccgcaaagggctgcagcagtgcgcagcacaccgccgctccgctcaggttaaaaatggcgtgggctgccgccacccgcttggcgtctcttccctgcccgatggcggcaagcaccgccgtgatggtggtgccgatgttatcccccagcaaaatgggaatggccgccgtcagccccagcaggctgtgcacgccgtctgccccgggctgcgccgccatgctttgcagcagcgccactgtggcagagctgctttgcaccgttaaggtcatgcagacgcccgccagcagcccatgcaggggactttgctgcacccgggcaagctccagccggagcagagggctttgcagcagcggttccatggcgctgcgcatcaccgtaacgccctcaaacagcagtccgaagccgaacactgcctcgcccacgcagcggccccgccagcctttacaggccagacagagcagcaccccgccaaacagcagcagataccgccagctttccacccggaacgccagcagctgcgccgtgaccgttgtgccgatgttcgctccgaacaccaccggcaccgcctgccgcagctgcaacagccccgccgccagaaaggcaatgaccataaccgtgaccgccgagctgctttgcagcaccgccgttaccgcagcaccggtcagcagccctgccgccgggtttgcggtgcaccgcgccagcaggctgcgcagacgcctgcccgctccctgctgtactgccctgcacaggctgtccgttccatataaaaacagcgccaatccgccgaatacctgcaacaacacttggaatccctgctccatccgcaccctccgtttctgcctgtcctttatttttatgcagcgagagccggtttgcgcattgacaaaacctacaagttttttgtgaatttttgtttaatattttcccattcccttgcaatccggctgcaaaaggaatatgcttatcaggcgttaatacttaacatctgttaagtatttgaaaaatgcaaacgaggagggactgtcgtgtccgagccaagcacccccagctttcaggggatgtgccactatatcgggcagctgagcaaggcatccaagaccgggatgcgggcggcgctggccgattgccccaaatgccacttcaatatgctggaaggcctgctgcacgccatcaactgtcacggaaaggacggtgccatttatgtctccgaccttgcccgggagattcgtcagccgctgccggcggtctcgcgcgggctgcggctcatggagcaggacggcactgtggtgcgggaaccggaccccgccgaccgccgcaaaacgctggtgcgcatcacccccaaggggtacgagctgtgccaccagtgtgagcaggctctgcgcaactactttgccagcgtgctggcacggttagagccggagcaggtagcccagatggacgcgctgcgcggcgcgctgatggatgccattcttgcggaaaatgccgcgcgcaacattgacccgaagggagaaacgaaccatgacaaagatctttaagcagctggcccggcactgggcggtctgccttgtggtgttcgcactgctgttcgtgcaggcgtactgcgaccttgccctgccggactacaccagcaagatcgtggacaccggcatccagcagggcggcattgaaagccccctgccccaaacggtgcgccagagtacgctggacgcgctgagcctgctgatgagcgaggaggatgcgcagaagctgcaaaacgcctaccagtactatctgcaggacgatggcgtgttgcagctgcgctccgacctgaccgaggacgagcgcaccgcactggaagaggccgtgaccaccccggacatcgtgctgtatatggctgccgcacaggccgccaacacccccgctggacagaacagcatgggcatgaccggccttgccgagacgccctctgccgctgcggacgcggacactgagaccgtcacccctacggcagcggatctggacactgtttgcagccagtttgccgccatgagccagatgcccggctttgaccgcagtatgcagcaaaagcagctggacggtgccatgagccagctggacagcaccctgctggaaaacctgaaaagccagtctttgctgctggtgcagctggaatacgaggcgcagggcgttgcgcaggatgtgcagatgggttacctcttccgggtgggcggccagatgctggcgctcaccctgctgatggtagccgtggctgtggccgttggcttccttgcctcccgggtatccgccgccatcggccgcgacctgcgccgggagaccttctccagcgttatcggcttctccaatgcggagatcgaaaatttttccaccgcctctctcatcacccgcaccaccaacgatatccagcaggtgcagttcgtctgcgtcatcctgctgcgcatggtggcctacgcgcccattctgggcattggcggcgtgctgcatgttgtaggcagcagcagcggcctttcctggatcgtggtgctggatgtggctctgcttttgttgctgctgatcttcctgatgagcgttgccatgccaaaattcaaggtgatgcagcagctggtggaccggctgaatctggtcagccgcgaaattttgaccggcatcatgccggtgcgcgccttcagccgcgaaaagtttgaggagcagcgctttgacaaggccaaccgggagctgatgggcacccagctgttcaccaaccgcgctatggtggctatgatgccctttatgaccctgatcatgaacggcaccagcctgctcatcgtctggttcggcggcaaggccatggatgccggcactatgcaggtgggcgaaatgattgcctttatcacctacaccatgcagatcgtcatgtccttcctgatgctggccatggtggccgtcatgctgccccgcgccggtgtggctgcggatcgtatcgacgaggtcatccgcaccaaagcctccattcacgacccggacgaagccatcgcaaaggccgcacaggcgcacaccgactggcagggcgtggtgcagttcgaggatgtgagcttccgttaccccggtgcggacagcgatgcactggaacacatcagctttaccgcaaaacccggcgagactaccgccatcatcggctccaccggctgcggcaagtccaccctgctcaacctgatcccccgcttttacgatgtgaccggcggcaaggtgaccgtggacggcattgacgtgcgcgagatgccgcaggcacagctgcacgacctgctgggctatgtgccccagaagggtgtgctgttcagcggcaccattgacagcaacctgaaattcggcggcgaggatatcaccgatgcacaggtgcacaaagccgccgccattgcgcaggccactgattttatcgaggcaaagtccgaaggctatcaaagccccattgcacagggcggctccaacgtatccggcggccagaagcagcggctttccattgcccgggcaattgccaaggaccccaaggtctatctgtttgacgacagcttctcggcactggactacaagaccgatgtaacgctgcgccgcgctttgaaggcacagaccgacaacgccactgtgatcattgtggcacagcgcatttccaccgtgctgcacgcaaaccagatccttgtactggatgaaggcaggctggtgggcaagggtacccacgcccagctgatggtcagctgcccggaatatcaggagatcgcccgcagccagctgagccagaaggagctggcgctggataccctgaatacagaaaaggagggtgagtgatatgcccagacccggacgtcccaccaccgagcgcgccaaaaactttaaaggcacgctgcggcagctcatccgcaccatgagccactacaagctgccccttacggcagccatgctgtttgctgttctgtccaccatcttcaacattgcaggccctaaggtgctggcaaaagccaccaccgcccttgccaccggctggatcgcccggctgcgcggcaccggcagcatcgattttgtgtatatcggccgcatcctgctgttcttgctgggaatgtacctgctgagcagcgccttcagctttattcagggctggctgatgaccggcctttctcagaaggcctgctacgacttccgtcgccagatcagtgaaaagatcaaccgcctgccgctggcgtactttgaaaagcgcaccgtgggcgaggtgctctcccgcatcaccaacgatgtggacacactgggccagagcctgaaccagagcatcacccagctgatcaccagcgtgaccaccatgatcggtgtgctggtgatgatgctttccatcagtccccgcatgaccctgattgccctgctgatcttaccggtatcgctggcgctggtgctggtggtggtcaagttcagccagaagtacttcaaggcacagcaggccacgctgggcgtggtcaacggtcaggtcgaggagatctacgccggccacaatgtggtcaaggcgtttaaccgcgaggccgtggtactggcagacttcaacgccgccaacgataagctgtacgaatccgcatggaaaagccagttcctctcgggccttatgatgcccatcatgaactttgtgggcaacctgggctatgtggcggtggccatcgtgggcagcatttttgctgcaaacggcgttatcaccattggcgatattcaggcttttatccagtatgtcaaaaactttacccagcccatccagcagctttcgcaggtgtccaatatgctgcaaagcatggctgctgctgccgagcgggtgttcgagtttttgaatgagccggaggaagagcagctggcagaccccgcccgccgcgccgaccccgccgacattgacggacaggtcacctttgagcatgtgcgcttcggctacaccccggacaagaccgtcatccacgacttcagctgcacggtgcagcccggccagaaggtagccatcgtaggccccaccggtgcgggcaagaccaccatggtcaagctgctgatgcgcttttacgatgtggatgccggttctatcaccctgaacggccacaatgtgcgggactttgaccgcagcgccctgcgcgagggctttggcatggtgctgcaggacacatggctgttcaagggcaccatcatggagaacatccgctacggccggctggacgccaccgatgaagaggtgattgctgccgcaaaggctgccaacgccgaccactttatccgcaccctgcccggcggctaccagatggagctgaacgaggacgcctccaacgtcagtcagggacaaaagcagctgcttaccatcgcccgcaccattctggcagacaaccgcatcctgattttggacgaggccaccagcagcgtggatactcgcactgagcagcgcatccagaccgccatggaccgcctgatggaggggcgcaccagctttgtcatcgcccaccgcctttccaccatccgcgatgccgacctcatccttgtgatgcgggacggcgacattgtggagcagggcacccacgaccagctgatcgaggccggcggcttctacgccgacctgtacaacagccagttcgaggatgtggtggattaaagcacctgtcatcacaatataattgcaaaaagagcacctgtcgcctttttagggcaataggtgctctttgttttaccctctcagtcatcgctgcgcgatgccagctccccccgagaggggggagcttttctacatctgtcggtgcctgagagggttttcgtcttttctttatggttcctccaccggttccagcttcaagccgaacagcttttccgagagggacggcagctgttgctgcaaggcgcggacgtaggccattactaccggatcctcgcgcttttgccccagcacaacgccgaagcggtgtcccctgccccagtccagtacccgcacaaaactgaggtccggcctgcggtaatagaccgccgggaccatcttgagtgccgggtcgccgtaggccgcactgcggataccgcccaccggcgtaaactccacccctcggtccattccctcctgcagcaggcttgtttcgtagacagtctggtacatctccttgatgggtagccagcgatattgcaatgcctgttccaaggtcaatctgcccaccggcatatcagcgggcgggtggatggggatgcaaagttctggcatatagaacagcggcacaaaggtaagcccctgcgcgtagaactctgcactttccagctggaaggaaagatccatctccccttttttcaggctgcgccagacctcgctgcggttggcacaccaccccagaatggaggtatactgcaggcacaagtcacttgtcagggaaaacaagtcgtatgcgaacatccgcattgcctcatggcagcctgcaatcaccagatgccgttccggcggtttttcctgctgttgcaccgcgcgggcgtggcgcaacgcctgctgatacagagccaccagctgctttgccttggggtaaaaatcctgtcccgccggggtcagcaccacccggcggggcacgtgctggaacagctcgaactgcagctgcccttccagcgtgcggatctgctgcgaaagtgccgactgggaaagatacagtgcctctgccgccgcagaaaagctgttcagttccacgatctttacaaagccttccagtgcgctctcgttcatgcttttctccctcccgcaatacattaggtttgcctaaattataatataaaaaatatgaattgtaaacagcacccttctacgctacaattgttaaggattccgcaaagtgccttttactttgctgcacgataagaaggaacacaaagaagaacaaaaagaaagagagcgtacctatgaacaagatttcccgtaagggctttatcaagatcgccgctgccgccgccatgagcggtgtgaccgccggtgctctggctgcctgcaattccgcttccggttctgcctccacttccggtgctgccggtcagtacatccccggcacctacgagggcactgccgagggtatttcctccaccgtcaaggtcactatgaccttctccgacagcgctgtcaccgacgtggtggtggatacctccggcgagaccgcttccttcggcgctgccgctgccgatgagctgcgcgagcagctgctggctgctggttctgccgagatcgacggtgtttccggttctaccatcacctccgacgccgtgatgaaggctgccaagagctgctacgcacaggctaagggcgaggccgtggtctccagcgtgcagctgcccaccggcgatgagaacgactggctgggcaaagagcctgacatcgacgaggccgccatcaccgagaccgtggacaccgacatcctgatcgtgggcgctggcaatggcggtatgttcgctgccgcctatgcggctgccaacggcctgaacttccgtgttatcgagcagaacgccaacgtgcaggacacccgtcactggtacggcgctgttgattctgctgccgctaaggaagctggcgaacccgccaccgataaggcaaagctgctgagcgagatctcccgctacgcctccggcaagtgcgaccagcgcgttgtcaaaacctggatcaacgaatctgctgccatgcacgactttatgcgcagcattctggaagataagtacggctgggtgtgcgatttcacctccggcagcgaggctgcatggcccgcagagaatgccgagcacaacaccgactatctcttccctgtgcaggagcataactatatggccagcgaaagtgcctccggcctgccccgcaacgagctgctgctgcagtacattcaggagctgggctacgatgtggacttcaagaccagtctggccaagctggaaaagaacagcgatggccgcattaccggcatcatcgcccagagcactgaggatgaccacttcatccgctataacgccaatcagggcgtgctgctggcctgcggcggttttcccggcaacccctacatgatggagcagctggacccgctgggtaccagcgtgaccaccgcctgctcctactcccccgccgacaagggctacggcatccgtgcagcagtgtgggcaggtgctaatctggacaaggaatctgctcccatgctgtttgaccgcggcatcgtagcccccggtgtggatgccggttatgtggacagcgagagctcctttggcggtaaggctttccccggtaagatccgccagtacaaccccggtactcagcccttcctgaaggtaaaccgcaacggcgagcgttttgccaacgagagctgcccctataacgatatcgtctacgctgccgcccaccagccgggccgcgtctacgcacagatctgcgatgctaacattctggaggatgcaaagcgcttccacaccatcggctgctctgcccagacccgcaacggcggtgagaagtacattcagggcaagatggacgaggctatcgaggccggtgcattgttcaagtgcgatacgctggacgagctggccgacaagatgggctttaccggtgctgccaaggacaccttccttgctaccgtggagcgctacaacgagctgtacgataagcagaacgatgaggacttcggcaagcccacttaccgcctgagcgccatccgcaccgcgcccttctacggctgctggctgggtgcttccctgctgaccactgagcagggcatcgccatcaacgaaaagggtcaggctctggacaccaacaatcagcccatggagggtctgtacattaccggcgatatgtccggcagcttctttgccaacaactacccctgcctgatggccggtgtggctatgggtcgtaccctgacctacgccatgaaggctgtcaagcagatggcaggtctggagaacgcctgataaagcgcagttctccggcatactctaagcgtttcttcttttcttctttttcatgtgaagaggggcagccccatttggggctgcccctctttgtgtttttaccccgcacgccccctacacaaatggccgcgattgtgctatgataagcgtgaaaccgggcagttcattcccgcccggtcacaagatcgaggtgtttgtacaaatgtcggatattctggataccttacggcaggaaggggtggaccccgccctgcttacggcggtgcaggaataccgcgccgcccatccgctcagcgaggcgctgcgcccgcgcatccctgcccctgcctttacctactacggcaaagaggtgtgggagcaggcgctggcggccatcctctgcggcgaaaacctgctgctggccggcggcaaagccaccggcaaaaacgtgctggcagaaaaccttgccgccgcttttggccgccccgcatgggacatctcttttcatgtaaacatggacgccgcctccctcatcggcatggatacctttgcgggcgggcaggtggtgttccgtcccgggccggtgtaccgctgcgcacagtgcggcggctttggcgtgctggacgagatcaacatggccaaaaacgaggcgctggcggtgctgcacgcggtgctggacttccgccgcgccatcgacgtgcccgggtacgaccgcatcccgctggccgaggagacccgttttatcgccaccatgaactacggctacgcgggtacccgggagctgaacgaggcgctgacctcccgctttgcggtggtgcagatgcctaccatcacccaagataatctggaaaagctgctgcgggcgcagttcccggatctttcggcaaaatatgtgcaccagtttgcactgctgtttctggacctgcagaaaaaatgcgacagtgccgagatttccaccaaagcgctggatctgcgcggtatgctggacgcgctacggctgatccgcaggggcatcccggccggggcggcgctggatatgggcattaccaataaagcctttgactcctacgagcaggggctgatccgggacgtgatcgccgcacgcatcccggccaagttggatgccggaaagctgtttgcctgatggacgcccaaagctacaccgcgcaggagcggcgtgcggccaatcaggtctgggccgctgccggagcctacggctttgagccgctgtttctggcccataacacagacggcaccattgatttttacatgaactgcatcgtagggctggtgcataaatactacggtgatgcgctgatccgggacattttttccgcttgggagggtgacacacgccagcccatgctggacgatatggcgtggctgtacttagaaaacgccgcctaccggctggagctgccccgccgcccggtgctggaggcgctgcgctttgcccacgcggactacttttttgccatccagtataagctttcgcggcaggagtggatggcgaaaaaccagctggtgtacaccatgcaggctgcgcgctggcgcaaggttctgggacacaccgccccggtcatgaccccttacgaaagcagccttgccgccgcgctggaaccggagaccgtaccggaaccagcacagctcaaaaacgacctgctggcgctgtttgcaaaattcgccctgtttgacggcaaggtacgccagaagcccgcgctgcacctgcggctgcaaggcttttgggcaaagcttgccaccaaaaccatgcccacccagatgatcaagaccgaccgggtgacagtggagcattccggtgcggtggatgccacaggcagcgggctggcggtgaacaagcgccgggcaaacattaccctgaagcaacgcgccgcgcaggaccgcgcctacattgaaagctgcttcgggcgctgcttctacccgccggagcagctgcgcaaggccgagcaggagttgtgcactggggtgcatctgggctgtcatttgtggttcagcgccggtgtacccagcccggcgcaggcacccaccccggaagcgcggcagctggcacagcaggccgaattgcaggccgaacgcaaccgcgcctactatgcaaaaaatcaggaactgcatcgaagtgttgtactgcgccttaccgagcagatccgcaactgtattctggtgcatcagcagcccgaccagcgggtggcacgcagcggcaacctgtgcgccgggcgggtgtggcgcgccccttacctgaacgataacagggtgtttttgtgcccggaggaggaaaactgccccgcctttacggtggatctgctgctggacgcctccgcctcccgcctgcactgtcaggaggtgattgcggcgcagggtgtcattctggccgaaagcttggccaactgcggtattccggtgcgagtaagcgcctttagcagcctgcggggctacacggtactgcgggtactgaaaggctttgcggacaagaaccggcagaacatcttccggtacttcgcctcaggctggaaccgggacggtctggcgctgcgagctgcgggcgatctgattcagtacgcccccggccccgccccgcgtcatctgatgatcctgctgaccgatgccagccccaacgacagccgccgcattccgcccacagcagagaacccgctgggctgcgcctacgaggacgccgccggtgttaccgataccgccgcgcaggtgcgcaccttgcagcggcagggcgtgcgggtgtctgccgtttttatgggcgaggacagcagcgccggtgccgccacgcagatctacggcaaaaatatggcgcgcatccgcggcatggatcagcttgcccgcgctgccgggcgattgatccagaacgagatccgggagcttggcgattgaagaaatataaaatgacccctgtgggagcaactcctgccttagccggcatctcccgcaggggtcatttttcacaaccgattatcataaagcacaaccatgctttgaacttctgtttgctccatgccataagcttttgcaaaattttgtcgttttgaagaaacttgcagttgtttttttctcaaaagtatgctatactacgttcagagaagttttatacagcctgtcggcccgatcacccggctggcacttttacaacgtttcgctgtttgctttttaggaaggagatcaatcatggacgcttcccgttattttgacgccatgcacaacgccatgtccaccctgcacgccggtgcacagctactgctcaccatccgtttgcaggacacctgcggcaacgatgcctatcttgaagtaaaacagctgcccggggagcagagcgcccttgtgtgctactccaccatggggcggcgctgcctgaattttcagctgttccgcaagggctggcagctgtgccacaatgccgatgggcagctgaccggacgttttccgtccagtgccgacagcctgctcagccagaccgacttccgcgcctactgccgggaggatcggctggatgccgcccgcacccagcgccttgtggaggaactggggcagcgcgccggcacgaactatgttggtatcatcccgcagaatgcccgcaccggtgcacagatcacagtcgaaagccacctcggccgcggcgcacgctggagttattggagtcaggacgcttccccctgcctgccgctggccgcaattttgtactggctggctgattttctggccgggaacgagcgccgtgcgttgcagtctgacccgcaggccgccgcactggctgcgcagtggctggcaaaggacacggctgtgttcttctgcccctcccctgccttgaccgtatcccccgcagccggtcacagtgtcccggctgcacagcgcacccgccccgccccggtgcctgccgcacgcagcaagagctggcaaagcgttctggccgccatggctgcggtgtaagctggtaccttttcaatctggtttacatataaaagacgagtgctcgacaaaaccgagcactcgtcttttttgcagggtaatagcaaaaaagcaccccgccagccgtttccggtcagcggggtgctcagtgcttaaaagttacggttcagcttacgctacgcagcccacaggggagatcactcctcgatgtagccgtactgcaggtaccagtagccgtaggggctgtgccaagtgcccttcagagcggggctctgcagccagtagtcgttgtagtaagcgatgggcaggcagccggtatcctccatgaggatgtcctcagccttgtgcagctgtgcaaagtgctcggagacatcagcaacgcgggaagcctcgatagcagcatcgaactcggggttggagtacttgccatcgttgttgccgttaccggagcagaacagatccagcatgttggagggatcgttgtagtccatgacccagccgttacgggcaacatcgtactcgcctgcacgacgagcggcggtgaaggaggaccactccatcttgctgatggtcagggtgatgcccagatcgctccaagcctgctgcaggtactctgccagaggcacatggtagccagcatcgttggtgctgtactccagagtggggtagccctcaccattggggtagccagcatcagccagcagcttcttagcctcggccagattagcctcgtagtcagcagagatgtagggagcattgccattgtcgtggaagtaaccgttctcgtccacgatgccagggccaacgatgctgtcagcagtggagtaggtaccctgcatgatggtgttggcaacgtagtcacggtcgatagccaggctcagagctctacggaccttggcatccttgaaggcatcgcgcttcaggttcaggctgacatagtaggtgcccagaatggtgtcaacgtagaagtcgccgccatcctctgccttggtcaggctggggatctcgtcggtgggcacatccttgatcagctgagcctcgccgctgttataagcagcgaaggaagcagaggagtcctccagcagcagcagggtgatgctctcggaaacgatcttggagctatcccagccgccaacatagttggggttcttggtcagaacgatacgctcggagggagtccactcggtgatcatgaagggaccgttgcacacataggtatcgggagaggtgcaccatgcatcgccgttggcctcaacggtagccttctgcacagggctcatagcagcaaaggcaacgatcttatcaaagtaagagcaggggtaagccagaacgatggtcagggtcttgccgtcatcgcttgccttcacgttcagagcatcgaggttgggctccacggtggggttgccgtctgcatcggggaaaccggcagcttcttcaaagccgtcgatcatgcccaggcaggtctctgcgtagggagcagcggtatcaggatcagccatacgcttgaagctgtactcgaagtccttagcgttcaggtcggtgccatcgctccacttcaggccgtcacgcatggtgaaggtccaggtcaggccgtcctcgctggtggtccagctctcagcctgaccagggacagcctcgttgttctcgttgatgatcagcagggtctcgaagacggtgatgatggtgttgccgccatccacagcgctgttcagagcggggtccagagtctcggggttagaaccgtactggacggtgaagccagcggtgttgacactgccggtagaagagccagcagcggaagaagcagtgccggaggttgcggtagaaccggacttgctgccgccacaggctgccagacccagagcagcggcacccacgcctgcaaccttgaggaaattacgacgagaaatgcgtttcataataatatccttcccttatatcaaatttgagtgtgccaggttcccccagccgcctctatattcgatccggtgcaaatgtacaccggaggaacacgaatgattataatgcgttctcacggcggttacaagtccaaaacttggactgtaaccattttgtgacaacatttcagcgctaagttgaattgctttcaccttttactggtgtgaagtgttctcacttcacgcggtcaaggtgatggcaggctgcccagtggccggtggagacttccttgaactcgggcacctcgttggcgcactgctcgtctgcataggggcagcgggtgcggaaacggcagccggacggcgggttcaaggggctgggcacatcgccctgcagcacgatacgcttggactggcgggccgtaatggggtctgccaccggaattgcagagatcaggctgcgggtgtaggggtggatgctgtgagtgatcagctcgtagctgtcggccagctccaccatcttgcccagatacatcacgccgatgcggttggaaatgtgcttgacaacgctcaggtcatgggcgatgaacaggtaggtcagacccatctcctgctgcagatcctcgaacatattgacgacctgtgcctgaatggaaacgtccagtgcggaaacaggctcgtcacaaacgatgaactcggggttcacagccagtgcacgggcaatgcccacgcgctgacgctgaccgccagagaactcgtggcagtagcggtttgcgtgctcgctgttcaggccaacgcgctccagcagggcgatgatcttatcgtggcggtccttttcgttctcagccagatgatggatatcaatgccctcgcccacgatgtcgccaatggtcatgcggggatccagacttgcgtagggatcctgaaaaacgatctgcatccggcggcggtagggcagcatatccactgcgatcttgttgtccttatcaaacagcaggttgccgtcatagtagatcttgccgccggtgggctcgtacaggcgcagcagggtgcgtccggttgtggtcttgccacaaccggactcgcctaccagaccaagggtctcacccttgcggatggcaaagcttacgtcatccacagcctgaacgtacttgcggttcttgcccacaccgccggcggggaaatactgctgcaggtgctggacttcgaccagcgtcttgtgttcactcattctgccttttcccctttctcaaatgcagccttctgctgcagccagcagtaggtatagtgggtatcgctgagctcggtgcgcgggggcatcttgctcagacagatcttcatgcagttcttgcagcggggcgcaaaggggcagccggccggcggattcagcagatccacaggggtaccctcgatgggcacaaggcgctcgtgctctgcggtgttcagcttggggatggagttgatcagacccttggtgtactcgtgacccggctggtagaagatctcgtcggtagtgccgtactccacaatgtggccggcgtacatgacggcgatcttctcgcacatggaagccacaacgcccagatcatgggtgatcatgatgatgctcatgcccagcttcttgcgcagatcctgcatcagctcaaggatctgtgcctgaatggtcacatccaatgcggtggtgggctcgtcagcgatcagcagcttgggctcacaggccagtgcaatcgcgatcatcacgcgctggcgcataccgccggacagctcgtgggggtactgcttcaggcgcttttcgggctcgttgatgccaaccagctccagcagctccttggcgcgtgcccatgcatcggccttgttcttatcggtgtgcaggcggatgacctccacgatctggttgccgatggtgtacaccgggttcaggctggtcatggggtcctggaagatgatggagacctcgttgccgcggatcttgcggaagtccttctccttcatgttctcgatctcgtggccgttgaaccacaccttgccgcccaccagcttgccgggataagcggtcaggcccataacggagtaggcggtgaccgacttaccggagccggactcacccacaacgcccagaacatcgccctgattcatggtaaaggaaacgccgttcagtgcctttacttcgcccgcaggggtgaagaaagaaaggcgttcttctttgatgtcaagaattttctcgctcatttctgttcacctcatcaattcttcagcttcgggtcaaaggcatcgcgcaggccatcgccgaacaggttgaacacaaggatcatcacgctgatcatcagtgcgggagcgatcagcagatgggggtaggtgttcatgcccttgacggcatcggtagccagagaacccagagaaggcagcggggctgcaacacccagaccgatgaagctcaggtagctctcagtaaagatggaagccgggatctgcagggtggtggtaacgatcagggtaccgatgcagttagtgagcagatgctttttgatgatacggccgctggaagcgcccagtgcgcgggcagcggtaacgtactcactctccttcaggatcaggatctggctgcggacgatacgcgccataccgacccagtacagcagagcaaagatgatgaagatggagatcatgttggggccaagggtctgcatccacttgaagccgggctgggtggacagcttgtccagcgggtccttcagggccatgcccagcaggatgatcaacagaatgtccgggatggtgtacagaatatctgtaatacgcatcatgatattgtccacccagccgccggcaaaggccgcaaccgcaccataggtagcgccgatgatcagcaccagcacagaagcgatcagaccgacagacaggctgacgcgggtgcccatcatgatacgcacagcgaagtcacgacccatacggtcggtgcccagaatgtgcgggaacaccttttcgcctgcgtcgatacgcgcctgctcggaggcagagtattcgaagggcttcaggttgttgctgcccttcatctgctcggaatagctgtaaggccagacggcgggcagcagataggcaaagatggcaatggcaatgatgaacacaaagctgaccatggcgatcttgttcttcttcaggcggcggataccgtccttccagaagttgacgctttcgcgcatgaccaccaggctctgcttttcctcattgctggcgggcagaaaatcctccgcgttgagctgcaggctgagcggattctttttaatgttttccatgaaaatcgctcctttctcttactgcagtttgatgcgcgggtcgatgatcttataaaggatatccacgatcacgtttgcaatgatgaccatgctggacagcaggatggtggtgcccatgatcatggtgtagtcacggttggtgatagcagacacgaagtcgcggcccagaccgggcacggagaagatcttttccaccacaaaagaaccggtcatcaggctggccagcatggggccgacgtaggtgatgacaggcaggatggcgttgcgcagtgcgtgcttgaacaggatcatgaactgggacacgccctttgcgcgggcagtgcgcatatagtcctgacccatgacgtccagcaggctggagcgcatcagacgggtgatataagccgagggatagatggccagtgcggtgaccggcatgatataggcggctgcgctgttcaggccaacggtgggcagcaccttcatgttcataccaaactggtacaaaagcagcacgctggagataaagctggggatcgcgatgccgcaggtagcaaacacgataataacgttatccagccacttgccgcggttgtaagcggaaatgcagcccagcgggatgcccacgcacagagccaccaccactgcaatgcctgccagacggcaggacaccggcagtttgctggcgatgatctggttcacggtacggccgcgctgacgcaggctcagacccagatcgccgtgcaaaaggctctccatgtagttgacgtactgcacacccagcggcttatccaggccatacttttcggccaaagcctgctgagcagcggcgctgatggacttttctgccacgaacgggccaccggggaccaggttcatgacaaaaaaggtaaccgtagccacaatgaagatactgaagatacccattgcgacacgcttgatgatgtactttgccatcgtttgatgccactccaatcctatcaatgaattactgtttttgctctcaggccgagccacactttcccgcagtccaccagcctcacacatagcggacgtctgtccttggcacgcggacagaaaagcgaataataaaacgatggcatcttgcggtcgcataaacaccatcgtccatacccgagaaacactctatatattataaggataaccacggattttgtcaatttacatgaaaaaaattcacttcatttcagcaaagcatgagcgaaatattatactttatacaaattttctgtatatttgtaggtaaaagtgctacttcttcggcttttgggttgattgttccgttggtgcgtacaatctgccctcccctgtcggtgcaaaaagcagtgtctctgccccggaaccatccatccataccgttagtatttttctccatattgcagcaaaaacggcaaaacaaagccacccgcagccccttctccggcacggtcggtgcccgggagatgtgctgcgggtggtcatgggtcgttttgcgggtcaggagtacaattttgcggtcagctgggagtacatggcgctcttttgtgccttataggaagccattgcctgatcagccaaggcggtgctctggccgttggcggtcagcacagtgcgcatctggctgacgatgttctccacttccttatcgtaagatgcctgcatcgcatacagtctgccgcttctcgccagtgcaatggagattttgcgcgcctgtgtctgctgagactccggcagcgctttgtattctgcctttgccccggcaatgcagctgttcagttccgactcagcgcgcgccttgacactgtacagctgcttcagcagcgccttgacctccgtctcgtaggcagcttcctgtttaccggaagaggacgccggtttttctgcggcagaagcagtgctggagctggatgtgccggtagtgttctccttcttgccggaagaggacgcattgctgctctccgtctgggagccagagctccccgaggaagcggcagaacctgcttcctcctgcggagcactggccgccgtctcctgttccccgccgctggatgcagcagcttcgccggtcagctcctccagcgtgatctcgccgctgagcagcttatccagatcatcatccgtcagggtgaactgtgtgctgtctgccggggcatccggcagggtttccggcagactggctgccatgctgcgaagatagagcagtacaccaaggacagctgctgccaacaatgccaccagcgtgcccagcacgatcaacacgattttcaggaccttatttttcttcatatcaaaatccgctgcccgggcagagtattcctccgcccgggcagttttctccttactaattggatcagacccacattcccaaaaactttttgggctgatgcagggtcgcagcgtccagctcccgatcatggaacagttcatcgccgttgcgcacgatgcgggcagccgtctccttgccaagcagcttttccagctgctgcactccctgtgccatacggggcgggcgcttgtccggggaatgggtgtcggtggagatgacatggaccaatccccactgaatgaacttgcacagttttttgcacagcttgggctccagcagtgcccctgcattgatctgtgcataagcaccggcggccacccagtcgtacagcagagtggggtcctccagcacatagggatagcgctcgatatgcgcgatcagcggcacgatgccctgctgctgcagctggtacagcgtctgccggataaagtgcggcttgtgggtggtgggaaactccagcagcagataggcggtatcccccatacacagcgcccgggtatccagctcgcacagaccgggagagaagaacacctctgcgcccagcttgaagtcaaactgcatgggctgtccctccagtgcggcggtcagctgctcaaaggcagcctgccgctttgctgtaaaggcttccaccgtggtacgttcgctgttgaagtggctggtaaaggcgatattgcgcacaccgtcctcatattccctgcgcagcagctccagcgagaccgctgtatcctttgcgccgtcatcaatgccgggcaaaatgtgacaatgcagatcagtcatagcagcgcttccttattcaacaacatcagccttctgtttttcgtaggcataattgtaattataggcatagctgtatgcgtagctggagcccttgagcgccttcttcatgtcgtagcgggtcagcacgctgcccagcacccggacaccggcatcctgcagcttcttcaccgcgccgcgcactgcatcggcgggggcgtagtcagagcgcaccacgaacattgcgccatccacacagcggccgatgaccgctgcatcggtgaccacggacaccgggggtgcatcaaagatgaccacatcgaacttttcccgcagggtgttgaccatggcctgcatctgcggctggctcagcatctcggaggggttcggcggcggggtgcctgcgggcaggaaggtcagattcatttccttcagctcctgcagcgcctcgtccagcgtgcactggttggacagcacgttggaaacgccctttacgttatggcctgccttcaggtagcggtgcagcaccggcttgcgcaggtcgcagtctaccagagccacctttttgccgctttcggccagcgtcagtgccagattgactgccacgttgctcttggattcctccggcacagtactggtgatgaccaacgtgtgcacgtccatggagcctgccataaagtccagattggtgcgcagagccttgtaggcttccacatagccaaagggcatccccttatcggtgatcagctgcagagtgcggtgctcgctttctttcttctttttaccaaacagattccacatcgtcttacacctccgggatcaggcccagcacgggcaggccgagcttcttctgaacatcttcgtcatccacaacggtatcgtgcagcaggtgtgccagcaccagcacgccgcacaccaacacagcacccagcaggccggccagcacaacgtacttcgtagtctgagggaacaccttgttgggatcgatgatcacatcgctcaccgccttgcaggaaccggcttccaccttttccaccagcacatcgggcacgatgtcggagattgtctgggcgatctcgcctgcgcgctctgcatcggtatcggtgaccgtgatctgcatgatctgggtggagtccacgctggtcacttccaccatcttatacaactcggtgtaggtcatatccagatccagtttgtcgatcacctcgttcagcacggtgttgcccttgatgatgaccgcataggtgctgatcaggttcttggcagaattgaagttatcactggtaaaggtggaggagttatcctgccgggtattcacgatcatgttgatagaggcccggtacttgggtgtaagcgcaaacacgcacaccagcaggcaaatcagcgctgccgcaacagctgctgccacgatctgcacggcatgcgcccacagcaggcgggccagttccatcagatcaatggtctcttcgtcctccatgttccggagcgactgtcccatagttgctttttcgtccataatagcgaaactcacctttcttgttttccgcagtgcaagaaatgtacaccgggtccctatagatacacatttgttttataatgatagcacatctcgttgtattttacaagcaggaaatgccattttctaccggcaaatacatggataaaatgtgccatctcccgtacaaaaaaggcatccgcagcacattgatgactgcggatgccttcattttgcggatttttagcgaatgcgcttaacgggagcccttgtcgtaggggataccctcggccttgggtgccatgctgttcttggaggtgaaggccagaatgaccatggaggccacaaagggcatcatattatagatgttgctggaccagtgcagctgtgcaaggaaggtagagtctgcaatgttggcaaggctcttgaacacggcaaagaacatagccgcgccaaagatgtggaaaggcttccactggccaaaaatcataactgccagtgccagaaagcctgcaccggccacgccgacttcaaagttccaggtctgcaccgggggcacgatataggccagaccgccgatggcgcccagcgcaccggaaaggataacaccggcgtagcgcatcttgtagacgttgatgcccaccgagtccgcagcctgcggatgctcgccgcaggcacgcagacgcaggccgaagcgggtcttgtacagcacgatgtagctgaccaccagcaagatcagtcccagcggcacgaacacgctgagttccagcccgccgatactgaacaggaagggcttgttggagtagttcagcttggcgctgccactctcgctgaagtacttggagatgaccacggcaatggcggtggccagcaggttcagtgccgtgccgccgatggtctggtctgccttcaggttgatggaggcaaaggccaacagcaggctgtaaatcacgcccgccagcgctgccaccagaatggagatcagcaccacaaggaaaggtgacaggcttgcaggcagcatggtcagggtaagcacaccggccacgccgccgatgaccatgatgccctccagtgcaatgttgatgatgccggaatgttcgctgaacataccgcccagtgccaccagcatcagcacgataccgtacagcagggtatatttgatcagaagcagcatattacttgccctcctttttggtcttttctgcggcaggcgcaggctctgcgttcacattggtcttttcggcattccggaacagcaggctctggatcttgccgcggaacagcatggagaatgcgcacaggtagatgatgatgccgctgatcagatccgagatctcagtggggtaaaacttggtggacaggaaggagccgccgaccgagatgtgggagatgaacagcgcagagaacacggtgccaatggggttggagcttgccagcagtgccaccgagataccgttgaagcccatgcccggcaggctggtggagttcagcgggttccactgggacacgttggacagatagaacaggcctgcgccgaagcccgccagcgcaccggcaatggccatggagaggatgatgttcttcttctcgttgataccggcgtaacgggcggcgttcttgttcaggccaacggccttgagctcgtagccgaaggtggtcttgttcagcaccacccagatcagcacggccaccgctgccgccaagaagatggcaatggtggtgctgttggtctggaacagcttgttcaagccaaagtccgggatcagggactgggcaaaatcggcattcttgctcaggttcaaagtacgggtgttgcgcacatcgtacatggggccggtgccgttctggtagatgagctcattcaccagatacaggccgatccagttgaacatgatggaggtaatgacctcgttgatgttgaagtaggctttgaaaaagccggggatcgcaccccacaggccgcccagcactgctgctaccagcaggcagacgaaccagggcagcttgagcatgatggcgcagtacagcgcaccgtaagcgcccagcgtatactgaccggctgcaccgatgttgaacaggccggtcttgaaggcaaaggccacggacagaccggtcatgatcaggggtgcggcattggccagctccttgcccacgccgtagggggcatcgtggaaaccgcccttgaggatgcgcacaaagccatcgccccatgcgtgtgcggggttgatggctaccagcaccagaaagcccaccagcaaaccaatcaggatgcacagcagtgcagccagcacgctggtaacagagctttgcaggctgctgctgcgggaaagttttttcttattcatgtgttactgctcctcctttccctgcttgcgggcgcctgccatatacagacccagctcctgcacggtggtggtcttggggtcaaactcgcccacgatctcgccctcgtacattacaaggatgcggtcagaaaggttcatcacctcgtccagttcaaggctgaccagcagcacggccttgcccttatcgcgctcggccacgatctggcggtggatgtactcaatagcacccacatccagaccacgggtaggctgcactgccaccagcagtttggggtcgcggtcgatctcgcgggcaatgatggccttctgctggttgccgccggacatactgcgcacggtggtcacactgccctgaccgctgcgcacatcgtactgcttgatcagccggtcggagtactcgcgcaccttatcggcacggataaagccgcccttctggaactccggctgccagtagcgctgcagcacgatgttgttttccagactgaaatccagcaccagaccgtgcttgtggcggtcctccgggatgtgacccatgccgtccttggagcgctggcggatgctctcgtgggtgatatccttgccgtccagcgtaagcttgccgccagacagcttgctcaggccggtcaggccgtagatgaactcggtctgaccgttgccctcgatgcccgccagacagacgatctcgcctgcgtgtaccttgaaggacacgtccttcaccacgtccttcttgcgctggtcattgtggatggtaacgttttccacgtccagtacggtctcgccggggtgcgcgggctgcttttccacctgcagctgcacgtcacggcccaccatgcggcgggaaagctcttccttggtggtgtccttgatatccaccgtgcccatatatttgcccttgcgcagcacggtgcagcggtcggccacagccatgatctcgttgagcttatgggtgatgaacaggatggacttgccctccttcttgaacccgcgcatgatctccatcagttcgtcgatctcctgcggggtcaacacagcggtgggctcgtcaaagatcaggatctcattgtcgcggtacagcatcttcaggatctccacgcgctgctgcataccaaccgagatatcgctgatcagggcatccgggtctacccgcaggccatacttttcgctcagcgccatcacctttttgcgtgcctcggccttctgcaaaaagcccatcttgttgggttccacgcccagaatgatgttgtccagcacgctgaagcattccaccagcttgaaatgctggtgcaccatgccgatgcccagtgcgttggcatcgttggggttgcggatggcaacctccttgccgtttttcaggatcttgccctgttccggctgatacaggccgaacagcacgctcatcagcgtacttttgcccgcgccgttctcgcccagaagggcgtgtacctcgcccttgcgcagttgcagggtgatatcatcgtttgccttgataccggggaattccttggtaatgtggagcatctcgatcacataatcctctgccaatctgctcactctcctttcgtgccgtaacgacaccttttctatactacaaaccattatacctgattttttgcggtttgcacacggctttttgattttttgtcaaaaagcacaagtaaaagtattacttttgtatggtctgcacgatttcccacctgtttctcccacacaggcatacaaaaagggcggggtgcccctgcatgagcaccccgcccctattacgggagtaattccgggatagcgattactggatgtagttgaccttggtgaactcgctgacggtgggcttggtagcgtcgtcggagctgttgtccacaacaagctcgccggaagcgatcttgctcttcagggtctcgtactcgtccttggtgaaggtcttgaagttccagctgtcatcagcagtgggcagaccaacgtagtcgccgtcctccagaccgaagttgccgttggtagcagcgatgttgctccactcgccggcctcgatatcgcccagagcggtgctgacagactcagacaggcccttcatggcagaggtgatgaacgggttgtaagcgtagccgtccttctcaacgccattagcaccgatgtagttctggtcaacgtcaacgcccacaacgtagccgttgttcttcagagcagcctcgacagcggaggtgtagatgccgccgccgcaggcaaagacaatctgggtgccgttggcataccagccctccatacgggaggtgatgttggcatcgccgtagaactggccgccgtagaagtagttgatgtcaatgttggtgcccagctcctttgcagcagcgtcagcgccctgcacatagccgtagccgtaacggataacggcgggcacagccatgccgcccaagaagcccagcttggtgtagccgtccttaacaacggcgtagcctgccagataacctgcctgctcctccttgaaggtgatgcagtagcagttggcggggatgctgtcggtgccgatatcgccctgggtcacatcgatagcgatgaacttgatgtcggggtactgctcagcagcccatgccagagatgcgccgtacaggtagccaacgcagacgataacgtcggcgccgtcgttgacagcctgacggatcatggtctcgcgatcctcatcggaagcatcggaatcggggatgtagtactggcagttgtcgcccatgtagctggagacagcagcccagcaagcctggttgaagctctcatcatcgatcgtgccggtatcgcaggtcagagcgaccttagcgatcttctcagcgccgtctgctgcgccggaagcggcggcagagctggcagctgcggaagaagcagtgctggtagaggaagcggaggaaccgccgcaggcggtcagagcagcggcagcggcagcagcaccggccacagccagaaagttacgacgagaaatcttcataagaaactctccttttattttaaaaaattgcgtcaaatgaatgaaatgtgcactctggcacatctactggctcaagtatagcgggtggaagtgacagatgcaagcaatttccgattacaaattctttacaaatcccttgtataatttataaaaaagtaatgcttattcaccaaatttcccctgcttgcgctgtttttcgcagaaagacagttactttccttccacggcgctgttgcccgccacgttggaggggccaaagccgaagggcagcagctcgtccatgctgcgctcaatgaaatcctccggggtctttgccataatgacgttcagctccggcccgccaaactcgaatagtgcctgacggcacaccccgcagggcgaggtgatctgccggttcacttcgccccggcggctgcccaccacggcgatatccgtaaacgcggtcacgccttccgccaccgccttgaacagggcggtgcgctcggcgcagctggtgggggtaaaggcggcgttctccacattgcagccggtaaagatgcgtccgtccgcagcgcgcagcgcagcgcctaccataaaatcactgtaaggcgcataggccttttcccgtgcggccagtgccatgcggatcagctgctgtttttcttccatggtcagttttgtcatgctgttccctccttttacgggcaaaaacagcgcggctgtgccttgggcggcagccgcgctgaaaaattatgcgatcagtactctgcgcccagagcgaccttcatcatgtcggtaaaactcttctggcgctcctcggcggtggtgatgccgggggccacaaagctgtccgagatggtcagcaggcaggcggcgttcttgcccagcacctgcgcgttggcaaacagagcaaagctttccatctccacgcacaggcagccgtcctcgtcccgcagcttttcccagtaggtgggctttgcgtccgagggctggcggtaaaacacatccgaggagtggatgttgccctcgatcagggggatgccctgctttgcagcggaggcacgcagcttttcgttcagggctgcgctgggcagagtgatgttgccagtaaagccgctctgcacccgggcgtagttgctctcgctcacagcgccggtagccagcacggtgtcgaacagcttggccttctcagtatagctgccagcagaaccgatgcggatgatattttccacgccgtagaagttgaacagctcgtaggagtagatgccgatggagggcatacccataccgctgcccatcacgctgatggggcggccttcgtaggtgccggtaaagcccagcatcccgcgcacgccagtcacctgccggacatcctgcaaaaaggtgtcggcaataaatttggcacgcagggggtcacccggcataaggactgtcttggcgaaatcgcccatttctgcgctgatgtgaggggtagacatagatgatctctcctttttattcatgatacagcagaggggctttccccctgcggaaaagcccttgctgctatttaccgatatttgctgcggttgaacacgttctgcggtgcgatgtaagagccgttgcgccggatctcgaagtggcagtggttgccgctggaacgtccggtgctgcccacatagccgatgagctgaccctgcttgaccgactgaccggcgtgcaccaccagcgacaggcagtgggcgtacaaggtggtgtagccgttgccgtggctgatgatgatggagttgccgtagcctgtacccgcaccggcgcggttatagccggccttggtcaccgtaccgcctgccgaagcgtaaatgggcgtaccggcggcggcgcagatatccacgcccttgtggctgccgccgtaccagcgggagcagttccgatagccgggcaccggccagataaactgtcctctgccggtgatataggatgcaccggaggacacctttttggtgcccaccgtaactttttcagtcacaggctccttggtcaccacagtgctcaaaatctgctgggaaagctgattgccgtttgcatcgtacacccgctgtgccgtcacggtgcggatgccgttctcacccttctgggtaacgcgcttggtaccggagttcaactcgttggatttggtggtctcggtggtgtaggcgatctcttcctcccagctttccaccttggtgatgcgcacctccagcgtctcctcctcccgcaccacggtcaatgcatcgccgggcaggatcttggagttctgggtcaggccgttttccccattagcggcaaagccggtgttcatatcgcacagttccttcacggtcaggccatttttctgggcaatggcccagatggtgtcgccgctctgcacggtgtaggtcttttgtgcctgctgcacaccggagagcagctgctccacctcggcttcctcctgaaagctctcggtgaagtagatgccgttttccagcgtgacatccttgttgaagcccacagtggtgttggggtcgtccgggttctcatagggctccagcaggctgctgatatagctttgcaggctggtgccgtccgcgcacacggcggtaagctcgccgtccagatatagggcagtgccctcgctgatctggtcgctggaattcttgaggatggcgtcagccacgtcattttcgtccatcacgtcatgggcgacggtcacggaataagtaggctccacggtaaagtgcgcctgctctgcgccggaataattgatacgctgctgcacagcttccagtgcagagttaaacacctcttcgttggccacatagcccacggtcttgtcgtccacttgcacctgcaaagcgtagggctggcggatggtggtctggaacacggtcaccataacagccagcgctgccaccggcagcacatacatagccatgcggggcacaaggcggatgttgtcagcgatgccatgggcaagaaagtggccgcttgcgcgcagcgcagcaccaaagccgttttccttgcgtacccggtgtgcgtggcgcagcagcgccccggtgccccgcagggcaagcactaccgggccgaacagatcccgcagcagctgcgccgccccgggaaaggccatggatgcgatatttttcagtagttctctgaccgtttgcagcagacgctgcagcccatgctgcaagcggcgtcctgtgcggaccacagcatactcggcggaaaagccgatggcgtacagcgtctcgcccaccataggtgctatgggattgtgcagcagcttgtgccacagcttttcccagcggtgctgacgcttgcggcgaatcctgtgccgccgcagcacgccccggcattggaactgcgcccacagcgagcgcagcttctggcggcggggctgccgtacaggctgcgcagcaggctgctgctcctttattttatcttcagtcaacgggatttttctccttcctgcgctgctgcagggcatttttccggcccggaacacaacagctagatggtgtacgttcccctgttcaaaaggccaacagggcctgtacacaatacgctctctttttattatacactttgcatggtttgaaacaagcgcttacataaaatttggctattttttcacgcagttttcacgaaaaaagcgcttccatatccggcggcagcgggctttccactgtgacggtgcgcagctgcaaaggcatttccacccggatgccatccggcagcggggtgtatacaggcacggcaaagctttgcctggcgcagtgcagcgcctgccgggcaatgcgctcccggctgccgccgtaaagatcgtccccggcaagaggatggccgatggacgcaaagtgcacccggatctgatgggtgcgcccggtcaccggcacgcaggctgcaaggctaaggccgttttcttcctttataatagtatactcggtgcggctgggcttgccctcgggggtaacgcagcgcccgatgatgctatcgccccggcggccgatgggtgcatcgattgctccttcccccagcggcagcgcgccctgcgcgatggcataatacagctttgtcactccgcccgccaacagcggcgcggcgtaggcgtttttggccgccagtacaaggccgctggtgtccttatcgatgcggttcaccgggcggaaaaccgggctgtggccgtgggcagccgcccacgccgcgtagccgttggccaatgtgcctccggggtagttcagggtggggtgcaccgccagctgcggcggcttttccagcaccaccgcaaaggcatcctcgtagaccacgttgaccgggatctccggctgcggggtcacgccatccccctccggcggcagggcaaaggagagcatctgcccggggtagatgcgccggtttgccaacacaggcacgccgtccgcaaaaaagccgccgccccggaacttgaccgcccgggcaagatccgtagagacggcacactggcgcagaaagctgcgcaccagcaccccatcgtgggtggtggccgtatccggcacggcaaaatacagctgcatggcctgccctccccctgcaaaattcacaaaaacacaaatgttattataacaaaaatccgtttcacttgcaaatcttacttttttatggtatcatgaggaacggaaaacgagtggaacatacggcggcggggcggctttgaccgctctgaggaaagtccgggcctcacagagcacggtaactgctaacggcagccgagggtgaccttagggaaagtgcaacagaaaacaaaccgccgcagcaatgcggtaaggatgaaacggcgaggtaagagctcaccagcgcatgggtgaccatgcggctttgtaaaccctaccggaagcaacgcctatatgggacgtacagcgctgctcgcgtgtcccgaaggcggcacgagcctgtcagcaatggcaggcctagacagatcgtcgtttaatacagaacccggcttacggtctatctcgttttcccttttgtgtttttgcgctgtctgctgttgcaggcagcttttttgttgcagcaacgtaaaaagaggccaccgcacaggatttgtgcagtgacctctttgttgcatgcaagactattgaaaatgcccgctgcgtgcgctttgggcattttcagcggcataatcatttttaattgcaacccgggaaaatctgcggattttcccgggttgccttttcacggaaaggggttgctcagttcccgcttgcgcccaggatggcgtccagcacggtggaggcggcgctgtacagcgaacctgcggcctgctctacctgctcctgcgtgggcaggctgacggcgggcgtctcggtgttgccgccctcggcgggagcagtcgtttccggctggggcgtctcggtggcagcaggctgctcggcgggcgtttccgcgggctgctctgccggctgctcagcgggctgctctgcagcctgctccggcacgctttccgccggtacttccacgatcacgctgtcggcaggcgtctcgggcacagagacggcggcatcggggtcggtggtgggggtgtacacctccgtcttttccggggtctgggtggtggaacttaccgtgccttcgccgcccatcaccgccgcgatcatctctttggcctttgccacagaggcttcatccggcttcatgacatagagcttctgccccttggcagagtagcacttggtgctgctgccggaagtgccagtaacggtgtagcgttcaatattccactccgcaaaatcgctcagctgcatgcgcaccagcgcgctgatctggttggtagaaaggctggtgacaaagctgtcagcaacagcgtccagaattttggtaaagcccatcagcagcgccggggacttgatcttgttcagcatggcgtcgatcaccttcatctggttgatgccgcgctgcacatcgccggtcttgaaagcgtggcgctcgcgggcaaaagccagcgcagccttaccatccagatggttccagccctccacaaaggtggtggggtcgtagtaaccggggctgcccaccgaggtgaacgcctgatcggaatacacgtccacaccgcccagcgcatcaacaatgtcgataaaccctgcaaaattgatgcggatatagtgctccacgttcacaccgtacaggttgccgagggtgtccatgctggtctgcacaccgtaaagcccggcgtgggtcagcttatccttgctgtttgttccggcaaggtccacataataatcgcgcggggtgttgatcagcaccacctgcttggtaacggggttcactgcggcaatgatattcacatcactgcgcgctttttcggtcagatcgccgcgggtgtccacgccgctcaggtacagcacaaaaggctctttggtgatcttattggcctcggcgttgctcaaaaaaccgttggtcatattgcccagcgcgtcgaggccctgctgtgcccacacgcagcccaccgccatggcggcgcacagcaccaccgagaacacccgggacactgtgcctgcagttttgtactcctgacagcgcttgaccagcagccacagcagcaccagcagcgccgccagcaccaccagatacagcaccggcagcatctgggtgcgccacagctgcaccagcgccagaacgcttaaaattgcctgtacgatcagcaagatcttccctcgtttcgggggctggtacgccccattctccccgccagcagtgttgcggggggtgttttgctgcgggcggcggggcggcgcagcctgctccggcggcagctccgagaaaaacgcggcgctgtccaccaccacagtggcgtcctgctgttcagccttgtgcaaaagacggtgcagggaacgaccgtcctccttgcgggaatgctcattttcgtccaacatgagaatactccttttttcagcccaccggaacgatggtcagcacggcgcgggcaggcagacaggtggcggtctgatcctccgccgacagccagccaaagccctcgcagatgtgatccgggcagggcgattcaataaaccgcgccctgccgtcctttacctctatatgcaccgtataataaccggtgtccacactgtaagtttcgtccttttccaacggaatgtccatcacagcgttgttgtcgccgtaaatcagctgtgcagtcagttttccgccggtggcattgtggctgcgcacggccagcagcaccgctgcgatggccagcaccaccaccgcaaacaggatattggtcaaaagctttttgttcttcatggcttactgctccccgggcttgagctgctccagctctgccagccaaagggtggcgcaggcatcgctgggcatgcgccagtcgccccggggcgaaagggtcacgctgcccaccttggggccgtccggcaggcagctgcgcttgaactgctgagcaaaaaagcgccagtagaagttgcgcagccacttgtacagcacggcatccgtgtactctgctctgcctgcaaaggccgcctttgccagccggtagatctttgccgggccaaagccgcaacgcagcacataatacaggtaaaaatcgtgcagctcgtagggacccactaaatcctcggtgatctgtgcaatttcgccgtccttggcgggcagcagctccggcgacaccggggtatcaagaatatccagcagcacatcgtgcaaagcagcggtggcagcagtctcagcttcgtactgcaccagatagcgcaccagcgttttgggcacaccggcatttacgccgtacatgctcatgtggtcgccgttgtaggttgcccagcccagcgccagctccgaaaggtcgcccgtgcccaccacaaggccgccggtgcggttggcaaggtccatcagctccagcgtgcgcacacgcgcctgcccgttttcaaaggtaacgtccagcacagtctcgtcctgcccgatatccgcaaagtggctgcgcacggtgtcggcgatgcgaatttcctgaaagcgcacgcccagctccccgcacaaaatctcggcgttgctgcgggtgcgcttggtagtgccaaagcagggcatggtcaccgccagcacatcggcggcggggcggtgcagctgtttcatggcgcgcactgccaccagcagggcaaggcagctgtccaagccgccggaaataccaatgaccgctgtttttgcgtgggcgtgttccagccgcttggcaaggccgtcggcctgcatctttaaaatcagctcgcaccgggcggcgcggcgctgcgggtcgccgggcacaaagggggcggggtcaatgcggcgggtgagcaccgtttcctccggtgtcaggtcaaattccaccgtgacgtagccctcggcagtgtgctcaaagctggtgttgcgggcacgctcggcctccatgcgctggcagtccagctcggtctcggcgtaatcgcccgcaaagggcgcagtctccgccagaatactgccatcctcggcgatgaggtcgtgcccggcaaacaccatgtcggtggtgctttcaccgtgccctgccgaggcgtacaggtagccgcacagcagccgggcagactggtttgccaccagcgcgcggcggtactcggctttgcccacggtctcgtcactggcggaaaggtttgcgatgacggtagcgcccgccagcgcatggaaggtggagggcggcagggcgctccacaaatcctcgcacagctccacacccagcacaaagctgggcatctggcggcagcggaacagcagcgacgtaccaaagggcacctgctgcccgcagacggtcaccgtctgcacctcggtgctgccgggggtgaactgccgtttttcgtaaaactcgccgtagttgggcaggtaggtcttgggcacaacgcccaacagctgcccgcggcacagcacggcagcgcagttgtacagcttgccgtgcaccagcagcggcaagccaaccagcgccacggtatccagcgtgcggctctgcgcaagcagccactccagcgcatccagtgcgccctgctgcaaggtgcgctgcaaaaacaaatcgccgcaggtgtagccggtaaggcaaaactccgggaaaaccgccagctttaccccccgctgcgcggcagcttgcagctgcgccagcacctgctgcgcattataggtgcagtctgccacccgcagcgcgggcgaaaaggcagctgcctttaaaaaaccatctttcataagaggatttcacatcctgtctgtttcaatgtagccatggtgacccatgttgaccatagtataccacaaaccgcataaaacggaaagtaacagactggtaaaagaagtgtgaacgtgggaaaaccctctcagtctcgtttttccagttagcgacttcccggagtgcaccccttccgtctgctcacttcgttcgcagccaccttccccaaggggacggctttgggcggtgatggcaaactttccggcagcgccaaaaggcgtccctcttgggggagctggcgagcgcagcgagacggaagggataaaaaaacacccccgcaggcataagcctacgggggtgttattatgctagtatgttccctgcacccctaggggtacagtcacgcaagcatgagcctatcagtcaagctgattacttaagctttgtagacgccctcgccaacgatgttcttagcggtgccgaagcccaggttgtagatagcagccagattgccagcaacgttcaggatgctgttcacaacgcccagagcgccgtagccgaacttctgagcgccagtggactcaccggtcacattatcggtgtagttgtccttccagatcttgctgaactggccgccgaagccggtcaggccgtcgccgggggtccaggtgccgctgaacacagcgccaacggtgttgtccaggaagccctgaacgtacttgttaccaacgatggtaatcaggttcttgtggaagttctgccactgagcagcgcccatagcgggtgccaggtagtcagcaacgctaccacccataacgtaggtcatctcgttctcagacacagcagagaaatttgcaggcatcatcataatgaattactcccttcaaaaatagaaaaaatattttcgaaccggtatttccggctcaatccttattaggatggcaataatataccacactttccagaaatgttcaagtacttttttgaaaaaagtgtaaaaactgtgaaacatcgtcccggcttttgtagcaaaactgcacttttcatgcgggtttttctggtgtgacaagttttttcgcaaatttgtgaaaaatagactaccagaaccataaggcggtgctttgcaatgaaaacagttgtttttgtggacgaattgctgctggtaaactttgctgcagccgccgcgctgctgctgggcgcggggcttttatgcgggcgcagctgcaccgggctgcggctgtgcgcgggcagcgcggcggctgcggtcagcacccttgtcctgctggccccgccgtggcccgccccgctggcggtactatataaaatcgccagctgctgcggagtggtggcggtgtgctacggcgtggccggggtgcgcagctttgcccggctgtgcggatggtatgcggcgctgaacggcctgctgtgcggtgcggtggtgctgcccggggtacaggccaacaacctgagcgtgcttttgccggtgcgcccggggcatcttttgctctgctgcgccggggtgtacgggctgctgcgcgggctgctggcggtgtttggccgcccgcagcggggctgctttgccgctgtgctgcaaattgcgggggcaacagtgccggtacaggcctaccacgacaccggctttaccctgcaagacccccttgccgggcggcgggtggtgctggtgcagtacccgccggtgcgcagccggctgcccgcaccgctgcgcacctacttagacagctggtttgccgccggcgctgccccgcctccggggctgagggtgcagtttgtaccctgcgccgccgttaccggccattgcctgctgcccgccgtgcccgccgcgctgtgccgtgggcagcgccgcgtgcccggcctgctggcggccttttgcgccccggacgcccccaccggcgcatggacgctgctgttgggggacgacgtggcggaggaggtgggggtgtaggagttctccgccctctcaggcgcttccgcgccagctctccccttgggagagctgacaagctttgactgagggagtcctttataatacatataataaaaggtgcacaggagggatatccatgttgcagtttttccgcaaggtctggcagcggctgtgggggcgtttgcgctactgcggcgcggtgcattatctggcgggcgggccaagcctgccaccgccccttacccccgagcaggaaaaagccctgcttgaccgcatggctgccggggacgctgccgcccgcgaggaactgatcacccacaacctgcggctggtggtgtatctggccaaaaagtacgagaacagcggtgtgcccgccgaggacttggtaagcattggcaccatcgggctgatcaaggcggtaaacaccttcacccctgcccgcagcatcaaactggccacctacgccagccgctgcatcggcaacgagatcttgatgtacctgcgcaaaagctccaaccgccggcaggaggccagcatcgacgagcctttgaacgtggacggcgacggcaacgagctgctgctctcggacattcttggcagcgacgccaacgcggtaagtcagcagctggagcaggacgccgagcgcgcggtgctgcgcagcgccgtagcggcactctcggcacgggagcggcagatcatggaactgcgtttcggccttaccgacggcgtggagcgcacccagaaggaagccgccgatgcccttggcatcagccagagttacatctcccggctggaaaagcgcatcatccgcaccctgaaagcccgccttgaaagcgagtagcagcgggcgcagcgcttgacattccgcgtgggaacgtgtatcaggtttgtctataatgcgcccctcttttgcggaggggcgctcaattttttccacgcatagcgcccggcgcgcagagccatacttccggtaaagctaaaagaccgggggcgtttggatgtacaacaaggtggagctatgcggtgtgaacacagggcagctgcctgtactgaccgaggcggaaaagcggcagctgctcacccttgcccacgccggggacaaagctgcccgggcgcggatggtggagggcaacctgcggctggtgctcagcgtagtgcagcggtttgcccagcggggcgaaaatctggacgatctgtttcaggtggggtgcatcgggctgatcaaggccatcgacaactttgaccccgcgcagccggtgcggttttctacctacggcgtgcctatgatcatcggggagatccggcggtttctgcgggacaacaacgccctgcgggtaagccgcaccctgcgggacaccgcctaccgcgccatgcaggcgcgggaaacgctggaaaagcagctggggcgcgagcccaccatggacgagatcgccgctgcagcagggcttgcccggcgcgaggtgaccgccgcgctggagtcggtggtggagccgctcagccttgacgagccggtgtacaccgatggcggcgatgccatgtatgtgatcgatcaggtgcgggacccggacagcgaggaaagctggatcagcgggttgcagttccgcgatacggtagccgccctttcgccccgggaaaagcgcatcatggagctgcggtatctgcgcggcaagacccagatggaggtggcgcaggagatcggcatcagtcaggcgcaggtaagccggctggaaaaaggcgcgttgcagcagtttcacaccgggggatgaaggcagccgcctgaaaaccctctcagcaaaaaagaccgctgcgcagtgcagcggtcttttttgggcttcagcggcggctgtatctgcgccgggtggcagccccgccccgcaggtggcgctcggccttgttgcgggccagcacggcgcgcacctgcccgtacagcgcagggctgatgctgcgcagccgcacggcaacgtccttgtgcacggtggacttgctgcacccgaacgcagccgccgctgcccgcaccgtggcgttgtgggcggcaatgtactcccccagctgcacggcgcgctgttccggatcggctttcatatcccgcctccctgcgttccagctttgcaatggtataacatacgcgccgccggggcggattatgtctgcgggcttgactttttgtcccccggcgcgtatactgtgggcggacataaaaacaggggcgccgtaaggctgagatccgcatcgcgcggagtaccctttacctgatccgggcaatgccggcgtagggagtttgcggaaccgtccggtacgttcaacaaaccttcatgcgtctgctgccagcaggcgcattttgtttttgtgtactactatgagagaggaatttttccatcatgtctaaaacctattccaagacccgcattctggtggaatgcgccctcatgatcgctattggcacggtgctttccaacatcaagttcttcaccatgcccaatggcggcagcattaccctgctgagtatgctgccctttgtgctggtgtccttccgccacggcgcaaagtggggactattcaccggctttgtaaacgcctgcctgcaaatgatcatgggcttctaccctcctcccgcttccaccttcctctacttcctcggtgaggtgctgctggactatgtgctggcctttatggcactgggtctggccgagctgttcgcccgccccttcaagaaccgcaccgtgggcgtggccgtgggcacctttgccgccggtttcctgcgctttatgtgcagctttttgtccggcgtgctggtctggggcaacctgaatgatggtctggccgcatggacttacagcctgacctataacggcagctatatgctgcccgagaccctgctcaccatggtggccgccgtgctgctgtgccgcgtggctccgcagatcttcgaccgtcaggcacgctaaggcgtcgtttttcaaaagagcacttctctgcttcccgatccccgccgggcacacgccctgcggggatcttttgctgcaaaaaattttcaaaaaactgttgacaagcgcacctccggctggtataattacacacgtcgtcaggcacgaggacaaacatctgggggtttagctcagctgggagagcgcttgcatggcatgcaagaggtcaccggttcgatcccggtaatctccaccagaacaaaagcactacacggaaacgtgtggtgcttttttgttgctgccaaacgagtgagggtttagctcacccaggagagtgccgtgcatggactgcaagagagtcaccgtgatcagaatcggcccggtaatctccaccagaatgaaagcactacacggaaacgtgtggtgcttttttgttttatctgccgttcaccttacgtcccctttcatgaaaaaagcgtttgtcgcagcccgcaggccgtgacaaacgctttttattttactgtgtgcccaagcgcattttgaagtcctgatagccaaagtgcaccagctcccggcaattgccgtctgcgcccagcagccagatgggcggcaggggcatcccgttgaaggtgttgttcttgcaggtggtgtagatggccatatcgccgaaaatgagcttatcgccctcggcaaggggggcgtcaaagctgtaatccccgatgatatcccccgcaaggcaggtggggccgcccaagcggacagtgtgcgccttctcccctgcctcgccggcgtccagcagcggcgggcggtagggcatctcgatgacatccggggtgtggcaggctgcggacatatccagaatggcaagactggtatccccgttgcgcagggtgtccagcacggtagtgaccagatagcctgcattcagcgcccaagcctcgccgggctccagatacacctgtacgccgtacttctgccgcaccgacaggatgcagctttccagcgtagcaagatcgtaacccgggcgagtgatatggtgtcccccgccgaagttgagccatttcattctgggcagcaggtctgcaaatttttcctccactgccgccagcgttaccgccaacgcatccgcgtcctgctcgcacagagtgtggaagtgcagaccgtccagcagggcgggcagctccgggtgttcggccactgcgtcatcccactgggcgcgggtagtgcccagacggcttccgggtgcgcaggggtcgtaaatttcgtgaccctcctgcgtggagcactccgggttgatgcgcagaccgatgcttttgcccgccgcctttgccgccgggccgaactttgccagctggctgggcgagttgaacacgatatggtcggcgtattgcagcaattcctcaaactcgtctgcccggtaggccgcgcagaacacatggttctccttctccggcagctcttccctgcccaagcggctctcgtacaggccgctggcctcagtacctgccagatagggtgccagcaccgggtagacgttaaagttggaaaaagccttctgcgccagcaggatgcggcagccggtgcgctgctgcacacccagcaggatctcaccgttgcggcacagttgggcttcgtccagcagatagcagggggtgggcaggcggtgcagctgcgcctcggacaggtttgccagccccgcaaagggcgggcggctgtcgcgcacccgcatcagtccaccagagccgggttgtggctctcggagcggggcaggccgtacttatccagtgcatccagatacggatcgggatcaaactcctcgacagtgtgcacgcccttggtggtccacttgccggtgagcagcatcagtgcaccacacatggcgggcacgccggtggtgtagctgatggcctgactgcccacctctttgtagcactcctgatggtcgcagacgttgtagatatagtaggtcttgtccttgccgtcctttttgccggtaaagatgcaaccgatattggtcttgcccttagtgcgggggccaaggctggcagggtccggcagcagagccttgaggaactggatgggcacgatctcctgtccgttgaagttgacaggggtggtggacagcatgcccacgtcctccagacagcgcatgtggtccagatagctctggccaaaggtcatgaagaagcggatgcgctttgcctccgggatgttctttgccagagactcgatctcctcgtggtgcagcaggtacatatccttgtcgcccacctgatcgaagttgtactcccgcttgatgctcatagccgggatctccacccagtggccgttctcccagtagctgccgggggcagacacctcgcgcaggttgatctcggggttaaagttggtggcaaaggcatagccgtggtcgccgccgttgcagtccagaatatcgatggtgtcaatggtatcgaactcgtgctttttggcgtaggcacagtaagcctgggtcacacccgggtcgaagccgctgcccagcagggcggtcagaccagcttcctcgaactttttggcataggcccactgccagctgtaatcaaagtaggcagagaagccggcctccttgcaacgcttctcgtagatggcgcgccactccgggtcgtcggtgttctcgggctcgtagttggcggtgtccatgtagttgacgccgcaggcaagacaggcatccatgatggtcagatcctgataaggcagggcgatgttcatcaccagatcgggctggtaggccttgatgagggcgatgacctcctccaccttgtctgcgtccacctgtgcggtggtgatcttggtagtagtggtgggagccagctcagcagccagcttatcgcactttgccttggtacggctggcgatgcagatctcggtgaacacctcgggcacctggcagcacttatggatggcaacagaggccacgccgccgcagccgatgatcagaactttgctcatgtcggttactcctttatctgtaaaatggtaggttcgtatttatacctgaaagcccggccagcccttgtccagcgcgatcagggtctcgcgcagcaccttgcaggcggtggcggtggaaacgccggtggtgtccagcgtgggggcaagctcgttcaggtctgcaccgatgatgttggccttggtcacagtgcggatagcatccagcagctgcaaaaagcttacgccgccagcctccggggtaccggtgcccgggaagcaggaggggtcaaggcagtccatatcgatggtcaggtacaccggcaccttgctctcgcacagctgtgcggtcagctcggcaagaccggtaaaatcgaacttgtgcatctcggtgtgctgggcagcaaactcaaactctgctcggtcgccgctgcggatgcagaactgatggatgcggccgtcccctaccagctcgtggcagcggcgcagcacacaggcgtggctgagcttcgcgcccagatagtcgtcccgcaggtcggcgtgggcgtcaaagtggacaatgtgcaggtcggggtatttcttcaccgcagcacgcaccgcacccagcgtaaccagatgctcgccgcccagcagcagcgggaacttgccgtccttcaaaatttcctctgcccgggcctcgatatcggccagtgccagctcgctggagccaaagcacagctccagatcgccgctgtcgaacacgtcaaaatcggtcaggtcggcgttctggtaggggctgtaagtctccagaccatagctctcgtgccggacggccgccgggccgaaccgtgcaccggggcggtagctggtggtggaatcgtaaggtgcaccgtacagcacgatgctggcggcgcggtagctgctgtcgcagccgataaaggtctcaacgttggggtgcatcagtgttcctccacttcccgcagcatctcctccagaaaagccggcaggtagaatgctccgatatgcagtttggtggtatagtagcgggtgcgcatattcagcgccttccacgcttctgcgtccagatcatcaatgggatggtattttttgcttgcaaagccgaacagccagtagcccgccgcaaaggtagggatatgtgcctgatacacccggctgatggggaaggtggatgcaatgcgcttgtggctgcgctgcatggcactggcatcttcggcgtagaaggggctgccctgctggttgaccatgatgccgtcctctttcagggcgttgaagcagctgccgtagaactcgcgggtgaacagaccctcagaggggccgaaggggtcggaggagtccacgatgatgaggtcgtactcctcctcgcagcggcggatatacttcagggcgttctcaaagtagatatgcacccggcggtcatccatacggcaggcattgccgggtaggtaagcgcggcaggcctccaccacctgcgggtccatctccacaaggtcgatgcgctccacgcggtcgtagcgggtcagctcccgcaccacgccgccgtctccggcaccgatgaccagaatgtccttggcctccttgtgcaccgccataggcacatgaacgatcatttcatcgtagatgaactcatcgcgctcggtcagcatcacgttgccgtccagcgtgagcacccggccgaactccggggtctcaaagatatcaatgcgctgataatcgctctgcttggagtagagctgcttgttcacacgaatgctgtgcttcacatccggggtgtgaaactctgaaaaccaaaattccatctctttccctccttatgccagaacattcaggtgcaagatttcggggtcctccgggccagtcatgctgcagcccttggccttggcgtactcgatgtagttcaagatctccttggtgatgcgctcgccgggtgcaaggatggggatgcccgggggatagcacatgacgaactcgctgcacaccatgccctcggtctcccgcaggggcaggctctttttgggggcatagaaggcctcctgcgggctggcagccaccacagggtcgatgtattcctgactcagcagacccgaaccgtcggtgcggtaacggcgcttgatctcagccagcgcactgaccagacgctccacctcctgcgggcgatcgccgatggacaggtaggcaaggatgttgccgatatcgccgaactcgatctgaatatcgtactcatcccgcaggatatcgtagacctcgatgcctgcaagaccgatatccagcgtatggacgctgagcttggtggtgtcaaagtcaaaaacagaatcgccgttgcacagctccttgccaaaggcgtagtaaccgcctacggcgttgatctcctcgcgggcatactcggcaatatccgccacctgatggaacacctgccgtccccgcagcgccagattgcggcgggagatatccagactggacatcagcaggtaactgccggaggtagtctgggtcaggttgatgatctgacgcacatagccctgatgcacgttgggaccgatgagcagcaggctggactgggtcaggctgccgccgctcttgtgcatggacaccgaggccatatctgcgcccgccgccatggcagaaaccggcaggccgccgccaaagtagaagtgggtgccgtgggcttcatccgcaaggcagagcatcccggcgtcgtgcgccatttttacgatggcacgcaggtcggagcagatgccgtagtaggtgggattattcaccagcacagccacagcgttggggtgctccttgatggcctttgccacctgctcccgcttcatgcccagcgaaatgcccagacgcttatccacctccgggttcacatacaccggcacagcgccgcacagcaccagcgcgttcagcacgctgcggtgcacattgcggggcagaatgatctcatcgccccgcttacaggcggtaagtaccatgctctgcacgctgctggtggtgccgcccaccattaaaaaggcgtgtgctgcgccaaaggcatcggcggcaagctcctcggcttcccggatgactgataccgggtggcaaaggttatccagcggcttcatgctgttcacgtccacgcccacgcactgctgacccagaaaagcggtcagctccgggttgccgcggccccgcttatggccgggcacgtcaaaaggcactacccgcatctgccggaaccgctccagcgcctcgtaaatgggcgcacggcgctgatccagccgggaacgcgctttgttctcgttcatcttttcctccgtccctgttcttctttttgcacaacaaaaaagcgcaggcactgcacaaatatgcagacctgcgcttggaaaagctttttccgcgctgataaagcacccagccgtaagtgccggtgctgcgcgttattcgcgatccaaaaagacggggtgatgagagtctatatagcaactacacttttactactcttattgaccgtttcacaagtctgcgcataggctgcgcaatttcatggttgtaaaggaaccaacttataaaatttgagcttcaaactcaatcaataatggcagcttgcgccgccggtcggcagtggacccggctgtccgtatggccttagccccgtttgggcggtcccgagtaaattgctttgaaaagactctgcaaggcggcgtctctcaaaatcaacaaaagaataacatgattcgccccgtctgtcaaccaaaactttttggcagtcgcccgctgcgggtgcgcgggacggcgctcggcgcgcaaaatggagcgttttgtgcaaaaaagcagatgcccttcccgccgcagtatgctataataaaggaacaatgaatggagaaagagggtgtatggatggcactgccaatcgccatcgtagaggatcagaccccagacgcccagcggctggaggagttgctgcaacagcagctgcccgaagccgagtgcacatggtttgcctgcggggatgattttctccgtgccgcggcagagcccggcttatacgccgtggtgtttctggatatctgcatggcgggcaccaacggcatcgagaccgcccgccgactgcggcaggccgacccggaggtgctgatcgtattcgtgacctcctcgccggaatatgtatgggatgcctttccggtgcaccccttcgattacctgctcaaaccctatcaggaggaaaaattcgtgcaccttgccgccgagctgcggcgggcgctgcgttgtcaggagccggaactggagatccgcattgcccgccaaagcattcagctgccgctgcgcaaggtgctgtatgccattgcccggaaccactacgtccttatcaccaccgaggatggtgagtaccgtgccatgtgcagctttgcgcagatcgaagaaaagcttactgctctggaaaactttatgagctgcaaccggggcgttatcatcaacatggacaaggtgctgcggttcggggaggactgcatcgagatcctggacggcacccgcctgccggtacggcagaaggataaatgcactctgcttgcccactttacacaataccagttccgccacatgcggcaggagctgcactgaggaaaggagcagccgccatggatcttgccctgttcggccgttattttctggattttgcgctgctgtatcccagcgcgtttctgtgtctggcatccctatgggaaaagctgcgcacccccaggcgcaccgcctgcatcgctgccggatgcatcaccctgctgtgcatcggctgcgccgcgctctgcgccgtgttcgggctgaacagcaattctctcctgcccgccatcgtgctggtctccttctggctgctgcgctggcgggtaacgccggaagtgaccgtaagccagaccgcgtttctgttttccatctctgccgtgatgatggcggtgtgttccctgctgtcgacgctgctcaacgcccagaccgagatctccaacccacagaccgtctgccttgcctccacggcgctgctgcggctgggccttgccgcgatgctcaccgtgctgttctggttcaccgccgtgcagtggagccggtggctgctgcgggagtacagcggtgaagccttctggcagtctgcgtggccgctgcccgccctctatgccgtttttctggtatactgtatgccgctgaaccccgccgtggtgctggtcgggcggctgaagatcatctcggtgctggcggtatccatctcgctgttcggcatctttctgctgctgtacgagatgtaccgcgttgcccgggagtttacccgcaatgcccggctggaccgggaaaaccagctgctggccatggaatcccgccggtacatggagttacagacctatctggacaacacacgccgtctgcggcacgacttccggcagcatctgcatgtgattgccggactgaccgagaccgggcagctggaggagctgaaaagctatctgcaccagtatgaaagcgagctcagcgagcaccgtcccagcctgtgcgctaatgccgccgtggatgcactggccggatattacgaccatgcagccgggcagcagagcgttcctgtggagtggaagctggcactgcctcggcagcttcccatgccggaggccgacctgtgcaccattctgggcaatctgctggaaaacgccctgcacgccagccagaagctgccgccggagcagcgccgggtgcaggtgatggcgcagatgctcagtcccgccatgctggggcttgtggtggagaaccgttacgacggcatgctgaaaaaacagcagggcatcctgcgctccaccaagcacgagggcaccggcatcgggctggtatctgccgagacggtagtgcacaaatataacggcaatctgcatctggagaccgaggagcagatcttccgggtgaatgttctgttaaatctgtaaccaccggcaggccaacgtgaaagcgttcacaaaaaaagcagcgccgtcctttgcagagaggtttctctacgaagggcggcgctgtattatttttcaagcttctccgtgcttttttgtgcggcttccagctcgtccacccgcttttgcagggcggtgatcttatcgtccattttcaaaaatgtccagaccagaacggccagcaccagcgcgggaggaacgaccatccacagggactgctgacaccagagcagcagcgaatagccgccgaatacagtaaaaataaatacggcaaacagacttgcagccagtacagcaaaaaatcccatacagaaagtctcctttcagttattcttccgtttcttcctcgtccgggtccagctcaatgctgaacacggcttttttcagcttgccgcagccctgcgccttcaggccggatttatacggttcccccgccagatacaaggcaaagcgtccctcgcacagcattccggcaatgctggtaccggcagtgcctacggtggtgtcggcggcttcatcgattggcttggtgggcgtcagctccgcaaggcttacctcaaacagctcactgccgtccaagtcagtctccagcgtaatgtgattgtcgtgccgctggaacagtgccttgtcggaggtctggggcgtgacggtgctcacggtgaccaccgccttgtccccatcgatgcgggtgcgcccggcaggcagggtggtgatatcccgcgccatgatgtactcgatcacggtgtccagattgtcgcttacgcccagatagttgggcaggttgttcagggtatcgtagatcatagaaaaagtcctccgtctgtgttgtttcagttacctgtatggtatcacaggtcagggacagatgcaatatgtgtgcgggcagatgtcgcgagccgcgcagaaaaggaacccgggtcgcggctcccagcggctgcgtcgtgccttgggcggcacgcgcatcctgctggccgcagccccaacagctcctccctgtttctgccgctggcagcggtcgtcgctgttgcacaggggctttcccccgccggactattcggcgggtcgatgctgttcgaatccacccttgcagcccctttttcaaggcaggtaaaacagaaactccggtacccattggataccggagttcttggtggagcgaagcaacccaaatccgaaccattgccctctggggcatctttggcggcgatttcatcgaaagtgatggtttttgtgccgtctttgtagttgaatgtaatcaaaactttttcatcatagagataaacggcattcacgaatgtattgataagcgtttcccggtggcttttcacgttcgggtcgatcttgcggaaccgggtcagccagaaccgaacctgattttcgctcaaccgtggccgagcgattttttcttcggcaatccgaatctcaagttctttctgctgggcttccagcttttccaaacgcgatttggtggagttggtcagcacacctgcttgaatggcgttcagcatattttcaatgccgttctctacctcgcgcatctgcttttccagcaaagggagagtggtgttttcctgatcctgcaactccatcacttccgcaacgatggcatcaatcacggcatcgtcctgaatcagcttcatggtttcagctatgaccaaatcttccagccactctttacggacggtctttttcttgcaggtcttgaaacgcttcgcggtggcgcacttataataatgatgaacgaccttgtttctacccgtaccgcactcgccgaacatcatcgcgccgcacattccacagaacagcttggtggtgagcagataatcatcctcggccttgtggcgggcaggagcacggctgttctttttgattttcagctgcacttcctcaaacaagtccttgtccacgatggccgggatgctgtcgggcatcacaatgtccttgaagtggttttctccgatgtaacgtttgttcgtcagcaacttctgaacactgttataggtgaacttctggttgcggttggtagtcacaccgctgtcgttcagccagttcatcagctccttcatggtcgcgccatcgttgtaccgctgaaaggcttccaccacaaagggggctttcagcgggtcaatttgaaagaacttctcctcgtccaccttaaagccaataggaatcgtgccgccgttgtacttccccttcagaacattctcggtcatgccgcgcacaactttttcagaaagttctgcggaatagtattcagccatgccggtgagcatgctcttgaccatgatacccgctgggctgtcagagataggctccgtggcagataccagcttgacatgattccgttccaactggtactcatagtgggccgaatcatagcggtttcgggcaaaacggtcaagtttccagaccagcacaatgtcaaacaaccgtttctcgctgtccttgatcatctgctggaagtccgggcggttatcggttttggcggaaagggcacggtcaatgtagtgtttgaccacagtgatgccgttcttttccgcataggcagtacattcccggatctgcccttcgatggattcttcgcgctggttatcgctggaatagcgggcgtaaatcacggcggtcattgactcacctctactttctcacttcaaatactgtggaagattccacgagccacgcagtacgcgatgaatttctacaaccctggtttcatcgttgacacggtaaaatacaagatactggtcaacgaccatcctgcggtaagtcgggtcgagacggtagagttcgcacatcttcggcgtatcgcccaacttggtgattttctcccgcatctctttcagaatgcggctggctgttttagggtaaaattctgacagataccgggcaatatcgttcaaatcctgcacagcaaggggcaaatatttgattttatacgtcatactgttcgtggagcgtctcccatacgctttcgtggtctgcccactgcgtgtttgggtccgctgcctgctgttttgctttggcaagttcctcggcaacatatcgctggtgcatgaactcctcgtacttggcatagtcctcaatattgatgaggacagactctcctcgaccgtggtttgtaataattacatggtcatgatctctgagcatctccgagatttcagcatagtggttgcgcagatcgcgggaaggacgaacaaatgtctgcatcataagggacacctcctatcaaaatcattgtatcacataatgactacaaaaacaagctaaatgatattattcgtcctttagacgtcgaagcggaacattaaactggtctaccaatgcatacagaggttcctgatcatcaaaaacatcttgatatgtcgcatattgatcgtatattttcaaagcctgaagagtgtcccgagccgttttagcgccaaccgttctggtccagccgttaaaaggaatcgtatactgatacttttcctttttcaacttccacatactatattcaacacgtgtgaaatgcattttacttccgcttgcttcgtaactaacatcagcattttccaatgctgcgcaaaattccttcatagttggtgatatatgataggagttatctttcttctttgtcatttgccttaacaagtaagcaatagtttgaatttcgggctcttcgcactttttgaacttcttccactctttaggatacgttgcttctactgtatgtgccgcaacagcaaccaccagtttttcatatttatttactgaaacagacggaatatatccatacaatgttaattggtatagcaatgtgagtagtgcggtgcgcttatttccatcatggaatgcatggtctttaactaggccataaaacagtgtcgcgcaaatttctattgaatcagtatatttctttcttccaccaaaagatactatttgtcttcctaaggcagaaccgagcaaatctgcgcttctaaggccaaccagcatatgttcaatattatcactggattcatcggtaaagtagtctgccagaataaagtaagcgtgcaatacatctgaaaaatttatcagcggatgctgcaggccttctatatctgggacatttttcgctatgcgttcatattcttctcttaaatcattccgcaaatatttcatgatagtttcttctcacttcattctccgcaagcggcgtacaaggtcggatgtactgtacagcacacgcgccaccgacacggcatcctcgcccacaatgtagaacaccgagtagttatccaccagcatctgccgcagcccttgggtgcgctccggctcgctttccaccagcgcacagcgttccggcagaatgttcagcgactgaatggcttctgcaatgcggttatactgccccatggccgtgtcaggcttcagcagacggtcagcaatgtagctgtaaatctgctccatatcactgagggctgtatgggaaatttttacgtcatactgcttcatctgtgctgttccctgaactgtgcgaatgcgcttgcagcatccacggtatcaccgttctgaatttccttaatgcctacctgcaaggctgcatgaagctgatcatcggtcatggtgtcagcattcagagccgcaggagccttcggcagggacagcgagaaggggatgccgccagtcagggtgatctggcgcaggtacatatcaatggctgttgccatcgggatgccgagctgcttcaacacgtcttcggcctgctgcttgacggtagggtttacacgaagattgagcgtcatcgttttttccatggttatcacctcagtctcattgtaacgcattttgcgttgcaagtcaattcgaggtaaacgcgcaaatgaaattctccatatcgcacaatatattcatcgttaaattgttcaaagcgcgggatattcaccctctataataaattcttggagtgtgcctagcttttgctgagtagtaagtttgaatattatctctcttggctgcgaccatggcagactggaagtttaaccttcaataaactatttactgtacaattcttttagaatacaccaaagattcattatcacaccaacgccaccaacaagtgcaatgagaatccctgcaactactgtaaggcgaacattttgattaaaggcataccataaaaaattagtgtccgcacaaagtataagcaaaattccaacaataaatatgcttaccgatacgattgctgtaagaatttttttcatgttacactctcctttgtgtatcactgttattctccgagaaagttcgactcacatccctatgatagtgaacacatcattcgtttcaaaacactttgctgcccaaggaactgcttttgcaataatctctttgcaagtacatccatccgattgactttttgttaaaatattatcccattgtacttttgtaacgattgttattccataaaagtcaaactctggaatcacttcaagaatcagatctgaaacatggcggctattccatacttcatcactgatgctaatagatgtgtcaagccagcacttgtcatgatactgcccttgttgaaattccaaatagcagctgctgtgtgaggcttttctttgatcttcgtcaataaaatacttcaaattagttcacccgtattagcagatagctgtggtcatcgctatgtactacaagcggaaaagttatatcaaatcccattgatcgttagcaattcaacccatcacagtaaccatctggaagtattgatactgatattcgtcttctaatacagcctgcatctcttccatgtataacgggtctttcaacagtttgagatgaaatgctcgctctctccaaagtcggactccaatttcagggaaaagatattccgttccaagttgcaagtccttttcgttgcaaataacgttgtcctttttcattaagctatcaataatacactcggcggttgtattaaacatatctatcccgaacaattttattgatgccactttagacaaatctctctggatgccgatttcagtagcttttccgttccgatactgcactagaaagaacgaatcattatccatatatcgtccggttatcaaattagggtcatcggtttccgcacaacgttccatttgcattgcttcattagaagaattcgaccattgtctcttcatttgcagaagagttttttctagctcatctggtgccatacctaattttaattgtccaattccaatatgtggtataataattatctctttcataacaaaaccttataccaaaaaggtaaaccacacaaatgcagcagttgcacatatcatcagaaccagtagtatcgtacttgcaagtttcttctcaatggaaactttctgattttcgcataggataatctgctgaagattgtgaaattcggcttcgctgacatttccatttaatgctttccatgcagtgcagcaatctgtaaccagcaaaaaatcggacagcatttccataaagatgacagcgaaaaatgccagagaaaagaaccacatcccattccattgaagttctgtcaacaccctctgaaggcttgaaggctttaatgacactaacgaaataatgtaaatcaacgtgttgcagaattctcttgctaatggccctttttgtttaagaaaatccattttcaaccctttccttacaaacggagtgacttaaccaccaatggcctgatagtaatccgttttagaacgaatcaaagaaccgtttgacttgtattctttgacagtttgatggtagcaattttcgaaatatgtgacttattgctgctgattacctccatcctgtaagcaccccaaaagatgtacgtaaagcctcttgcctgcatatttaagagaaagcggatatgctcttttactgaattgaacgccttgctgaacatcgaccgtgaccgcagttcctcgcaggatgctcccgaagaaaccgaggaaaccgaaacacctgcaactcgtccgtctgtgctggctgcactgggggaaaagaccaatcagccggaacctgtcaaaccgttccgcagctattatgataaggatggtgatgcacgatgaaagaaaagcgggatgaaaccatcatcctgcgcttgagcaaaacagaaaagaaccgtatctatgaaaacacacgcacctgtccgctgcgtaccttggagaaaagttctgctttcttgttctccgtatctgcgttgtggatgaactcgatctcctgttcgggcacaccggcgttgagcagcttggtgcgaatatcatcatagacgttgaacgaaccgtcccccttgggagtagacatatcgcagaaaatcaactgggtcagcttctgctccttggtgtcgttccagatgcgcaggacgttgttgacgcaggcatttaacttgctgttggggtcatcgggcagagcggaattcatcaaccgctgtattgtagcattccgctggagagcggtctataaatactactattttattatacgaggtaacgcctatgaacaatacgattccttttcactccgcaccccatgctccgcagatcacggtggatgtgaacatcctgaccatgctgaagcaggcggcatcctgtttgaccgaggcagcaggcagggatgtgtaccttgccgctatcggcccggacatggagctgaccattatcatggaggaggatgccccttccgttctgccttgttttgacgaggacgatgctctgatcaccgtgaagggcgcgccgctgtttatcagctacaatccggcgcaggtcctcaagctggcaggcaagcggtacctgaccggtccggtcatcttctaccgcaccgaggggcacggagccatcgtgtccctgacggtggaggacatttaccgctttcagacctatctggaaagtcacagcaccaccctgatggcagatgggcagaagctgacctgcatctgcatcgactgaggtgtgctatgctgaacttttttttcggattcgcattttttgaagccggtgcgattttcggattcttcgtggcggctctgatgcaggcggcacggagcggtgagattggactgaacggagaggaggattcgcatggctgaaaacaccctgtccgtgctgaaaattgcaccgggacagcatccgcagcaggtcgagattgacaataacctgaaagccttgcagcaggcagtgggcggctcgattgatgctgtttacccctttgcagacccggtggctatcatctgcaatgacgagggcaaactcatgggtctgccgttgaaccgtgccctgcgggacgaggacgggcagatgtacgacgccgttgccggaacctttctggtggtggggctgggcgaggaggattttgcatccctgaccccggaactggcgcagaagtacgagcagctattccatcagccggaagcctttctgaaattgggcaaccgtctgctggtactgccggtgcccgatgaaccttcggcagaaaagccccgcaccaagcccccggcagagtgtgaccgctaaaatcaccctgctgcattggaggtgatggcagtgcaggaagaaatcgaacagaaatccttcaacctgatgatctccaccacgaaattgtctgcccggacggtcctccgggcggtaaaggcggcgtatcggctgtaccagtccaaggcatcccaaggcaagcagagcgtccgcaccctgttgcggcagaatcggggcgtgtccagtgtggaaatcagcaaaacgggcatccgtggtctggaacgctacgccaaaaagtacggcatcgactacgccatccgcaaggacacctccgaggtgccgccccggtatctggtctttttcaaagccccggatgcagaagcctttcactcggcgttcaaggaatattcggcatccctgctgaacaaggacaaaagaccctcggtgctggcacgattgcaggagctggtgcaggcagcggcagaactccccggcaaagtccggcacaaggaacaggagcgggggctgtgaccacgaaaaagctgacaaagctgctggcgctgtatctgccctatattttgctgggactggtggcaacgaacttcggtgaagcgtggcggcttgctgagggcaaggaactgggcgataagatcatgtccatgatgggcaccatcccggtggcatttgcaaacccgctgccaagcctgcatccgctggatttgctggtgggcttgtgctgcggcacagggttgcgccttgccgtctatttgcgtggaaaaaacgccaaaaagtaccgccatggcatggagtacggctctgcccggtggggcaatgccaaggacattgagccgttcatggctcctaagttttccgacaacatcatcctgactaaaacagaacggttgatgatgtccaaccgcccgcctgaccccaagaacgcccgaaacaaaaacgtgctggtagtgggcggttccggtagcggtaagacgcggttttggctgaaaccgaatctgcttcagtgccacagctcctatgtcgtcaccgatccgaaaggaactatcgttcttgaatgtggcaacgcaatgttgaagaacggttacaagctgaaaatcctgaataccattaacttcaaaaagtcgatgcactacaatcccttcgcctatgtccacagcgaaaaggacattctgaagctggttacgaccctgatgaccaacaccaagggcgaagggtccggcggggaccccttctgggagaaaagtgaacgtcttttgctgaccgccctgatcgcctatctgcattatgaagccccggtggaggagcaaaacttcgctactctgctggaaatgctcaacaccatgcaggtgttggaggacgacgaggaataccagaacccggtggatctgctgtttgaagaactggcaaaaaagaagcccaacagctttgccggtcggcagtacaaactttacaagctggctgccggaaagaccgcaaaatccatcctgatttcctgcggtgcccggcttgcgcccttcgacatccaagaattgcgtgacctcaccatgtacgatgagctgcaactggacacgttgggtgataagaaaacggcgctgttcctcatcatgtcggacacggattccaccttcaacttcctcatcagcatggtctacacccagcttttcaatctgctgtgcgataaagcagatgatgtgtacggcggcaagctgcccgtccatgtgcggtgcctgatcgacgagtgtgccaacatcgggcagattcccaatctggaaaagctggtggccaccatccgcagccgtgagatctccgcctgtcttgttttgcaggcgaaaagccagctaaaggctatctacaaggacaatgcggataccatcattggcaacatggattctcaaatttttctgggcggctccgaacccaccaccctgaaagacctgtcggaaatgctgggaaaagagaccatcgacgcattcaacacctcggacacccgtggcaatagccccagttacggcactacgttccaaaaacttggtcacgagttactgagccgggacgagctggcggtgctggacggcagcaagtgtattttgcaactgcggggtgtacgcccgtttttgagcgacaagtacgacctgacccaacaccctaactacgagctgacctcggactacgaccccaaaaacactttcgatattgaaaaatatctgaaccgaaaagaaaaaatctaccccggtgatgagttcatcgtggtggatgctgattcgctcccgtctgcctgaaccggtaggcggtttaattttacccggaccagagaggtacaccagaaagtccactctcgccgcagttcgcggcttcaataggcagcttcaggtgtgtacggatggtctacaattttttcaaaataaaggagaaacgattatggaattctttaactctgctatcgaagttcttcagactctggttgtcgctctgggtgccggtctcggcgtgtggggtgctatcaatctgctggagggctatggtaacgacaaccccggctccaagtctcagggcatgaagcagctcatggctggcggcggtgtcgctctggtgggcatcaccctcattcctctgctgtctggtctgttcggctaagagccgcaggcgggttttcccgcctgtacatacgcaatcgctctatctttgctgtggataacagccctttatcataaggagcacattgcggtacgaatctccacccatcaatgaaaggcggtgtcttatgcagtttttgacccacattatttttctcctgaaccttctcaagaccctcatcaaccacttcagctaaggacggtgactgaatggaaaccgttctcaaagccattgccgactggatcaaaagcatcctgacggcaggcattatgtcaaacctttccgggttgttcgatgatgtgaacacgcaggtgggaaacatcgcacagcaggtgggcaccaagccctccagctttgaaccgagagtgttcgccatgatcgaagccctctcccggaatgtggtgctgcccattgcaggcgtgattttgaccttcattgcttgctatgaattgattcaaatgattactgaacacaacaatatgacacagtttgaaccggcactcatcatgcgctggatttttaagaccgctgtttcggtgtggctcatcagcaatacttttgatattgtgatggcagtctttgaccttacgcagaaagttgtgtccgattccagcggcatcattgccggaaacacccgtgtcaacgacattggcttgtcgatgttggaagccagcctgatgcagatggatgtaggacctctgttcgggctgttcctgcaaagtttcttcatcggcatcaccatgcggatattgagcatcatcatttttgtcatcgtctacgggcgtatgattgaaatctactgcatggtgagccttgcgcccatccccatggcgaccttcggcaaccacgagcaatcgcacatggggcagaactacctgaaatgcctgttcgcattgggctttcagggctttctcatcctcatctgcgtggcaatttatgccgtgctgatccagagcgtggcaatttccggggacgccatcaactccatttggagcattgtaggctacactgttctgctctgtttcagcctgttcaagaccagttccgtgacaaaatccgttctcggagcgcattaaaggaggtgctttattggctgcgtatatttccgttccccgtgacctgacgaaagtaaaatcgaaggtcgcattcaacctgacgaaacggcaactgctttgtttcggcacagcggctctcattggagtgccgctgttttttgttctccgggactccggcggcaacactgccgccaccctcggcatgatggcggtgatgctgccagcgttttttcttgggatgtacgaaaaaaacggtcagcccatggaaaagctgctgtcgtactatgtgcagtcccggtttgtccgcccgaagattcgcccctacaagaccaacaactactatgcgattttgatgaagggaggcatgacctatgattccgttttggaaaaagaccggtaagcacagcaagccgcagtctacgcagaagcgtaggcagaaagcaaagcctgctgtgccccggaccgcccagcagtccatccccatgcagcggatgtttgaggacggcacctgccgtgtccgtcccggctactacacccgcaccatccagtatcaggacatcaattaccagctcgcccagcaggaggacaagaccgccattttcgaggaatggtgttccttcctcaactttttcgacagctccatcaaatttgaactgtcctttgtgaacatggcaaccgacagcaccgagtttgagaaaagcatccgcattccgttccagaaggacggctttgacgatgttcgtgccgagtattcccagatgctgcgccagcagcttgccaagggcaataatggtctgaccaagaccaaattcatcacctttggggtggagggcgaaagcatggcacaggtcaagccccggctcgaccacatccagaacgatctgctgaacaacttccaccggctgggtgtgcaggcaaaacccctgaatggtgcccagcggctgaaactcatgcacgatatgttcaacatggacggcgtatccaagtttcactttgactggaaagaccttgtgaaaagcgggctgtccgtgaaggatgccattgcgcccaccgcctttgctttcaagaacagccgtaccttccagatgggcggcatctattgcgccgccagctttctgagcatcacggcctccgacatcagcgaccagcttttgaaggattttctggatatggattcgtcccagatcgtcaccatgcacattcagagtgtcgatcagaaccgtgccatcaagaccgtcaagcgcaccatcacggaactggatcgcagcaagatcgaggaacagaagaaggcaatccgtgccggatatgatattgannnnnnnnnncagagatgccaaggctcttttgaaggaattgcagagccagaacgagcggatgttccttgtcacctttctggtgctgaacacgggcaggactgagcaggaactggaaaacaatgtttttcaggccagctccattgcccagaaacacaactgcaacctgtgccgactggatttccagcaggagcaggggctgatgagcagcctgccgctggcagactgtcagatcgaaattcagcgagggctgaccaccagcagcaccgccatcttcatcccgttcaccacgcaggaactgtatcagtccggtaaggaaagcctgtattacggcctgaacgccctgtccaacaaccttatcatggtggaccggaaaaagctgaaaaatcccaatgggcttatcctcggcactcccggctctggcaaaagtttctcggcaaagcgagagatcaccaacgcttttctggtgacggatgatgatattatcatctgcgacccggaagcagaagtgcgacacgaagtcgcgtaatgtattgtgtataaacactgctctatccatttggagtaaccctactgtgacctgcactggtcaaaagccggcgttgggaagctcacaggacaatatgggaaatctgccagcctaaagcggatgtactgttagggtaaagaatgctatgtcgaacgtaatgtgaatcatcgtaaggatcgttacagggaataggtgaaataaggctgatacacctacaccaaaaggtgttggaggtggccgaggggcctttctgtaccccgaagcaaatggacacaaatcctcccggttcaaagatggcggctaaggcattcgagaattatgcattacgtggaacgtggaaaaccctatgcactcctttaataaaggtatcgacctcgcaagagggagaaacggtgcagagggtatgagatggaataaaaagcgaacggttcactgtaacggtgagcataggggttcaaaatttgccctgacctgaaagggtgctgacttattccgggtatttcatggcaagattggaggtatccctgtgaacgataagtattcaacgacggaaggtaaaacttctgagaagctgtcggacgaagctatgttgagtgcccaatggaaaaacattgattggcataaggcagagcgggaagtcaacaggttacaaatcaggattgtcaaggcaactcagcaaaaagactacaacgcagtaaaacgacttcagtatcttctgacacattccttttacgccaaagcactggctgttaagcgtgtcgttaccaacgatgggcgcaagactcccggtgtggatggtgttctctggaacaccccggcgaagaaaatgaaagcggttctatcgctgacagataaagggtatcgtgcgcgtcctctccgtagagtgtatatcgaaaagaaggacaagaagaaaaagcgtccattgggcattcctacaatgtatgaccgcgcaatgcaggctctctatgctttggcactggaaccggtggcggaaacaacagcagatgggaaatcctttggtttccgaaaaggaagatgcgcacaggatgcctgcgaatatctgttcaatgcactgtcgcgcaagcacatttctccgaagtgggttttggagggtgacatcaaaggttgcttcgaccatatcagccatgattggcttctggcgaacatccccatggacaagaacattttgaagcagttcttaaagtcgggatttatctatcagcgcgaactctttcctaccgaggaaggaactccgcaaggtggtattatctcccccattctggcgaacatgacgctggatggtatcgagaagaagctggtcgaacgctttcacacgaacgcgctcggtaaggtcgattcaagatttaagaatgcccacaaagtaaacttcgtccgctatgcagacgattttgtggtcacagcggcaacacctgaactggctcttgaagcaaaggagctgattcgagagtttctcgctgaacgcggattggaactttctgatgaaaagaccgttgtcaccaacattgacgatggtttcgacttcctcggctggaacttcagaaagtataacgaaaagctgattatcaagccttcccaaaaggcggttaaggctatcgtttccaatatctctgacacgattctccgcagaggaaaagcgtggcagcaagatgttctgattatgaagttgaatgaacaaattcgaggttggactaattaccaccagtccgtatgcgcaagtgatgcgttcgcgcatctggactatgtcctgtacgaactgctgtggcgatgggctaaaagacggcacccaaagaagaacaagtggtggatttccacgagatactggcatcgtgtcggtaatcgaaactgggtgttctctacggaaaacaaggagctgatacgggtggacagcacagccattgtgcgacataccaagataaaagctactgcaaatccgttcctcgatgaggcgtatttccaaaaaaggaaattcgataaaggaatgcaccggctgactggaaaattcaagatgatttggaaaaaccagaacggactgtgctaccactgcggaatgccgatggatgtaacggaagaaagagaaatcttctaccttgcaccaaaggcaaaggctggcatggaagatgttcgcaatatgcgctacgttcattgcacctgtcagcgtatttatgctgagaaccgcttgaagaagtgatgaaatgcttgagccgtatgacgggaaactgtcacgtacggttcttaggcgggaaggcggtggtaacaccgctgacccagccgattacgctccgctggtggagcgtctgcatgggcaggttattcacatcggtcccgccagcacccagtatatcaaccccatggacatcaacagcaattacagcgaggaggacaatccgctggcattgaaagctgactttattctttctctgtgtgagctggtggtgggcggaaaagagggcttgcagccggtagaaaagacggtcattgaccgctgtgttcatgtggtctaccgcaagtatttcgagaatccgaccccggaaaatatgccgctgctggaagatctgtacaacgccctgctgacgcaggacgaaccggaagcgcgccatgtggcggcagcattggagatctacgtcaaaggttctttgaacatcttcaatcaccacaccaacgtggacatccacaaccgcatcgtctgcttcgacatcaagcagctgggcaagcagctcaaaaagctgggtatgctcatcgtgcaggatgccgtgtgggggcgcgtgaccgccaaccgcagtgccggaaaatccacccggtactatgcagacgaattccaccttttgctgaaagaagagcagactgcggcgtattccgtggagatctggaagcgtttccgcaagtggggcggcatcccgacagccctaacgcagaacgtcaaagatctgctggcaagtcccgaagtatcgaatatttttgagaactcggactttgtgtatatgctcaatcaggcgaacggtgataggcagatcctcgcaaagcagctcaacatctctccccatcagctttcttatgtgacccactccggcgaaggcgagggactgctgtttttcggcaacgtgatcctgccctttgttgaccacttcccgaaagaccttgaactctaccgcatcctcacgaccaaactcaacgagatttcggaggggcagaaatgagcaatccgaagctgaacatcaaggaggaaacctcaaccaaaaagacccgttctcccccgaagaaaacgagggtggagcagtcggtgcccaaaaagaaaaagctgaaaaccgatgcagataaagctgcggaaaaggcacagcatctgcggtttggcaaggcggaactgaccccggacgagttgcgccgtttgagcaaggcgcagaagcgggagatgtacgctgcccatgccgcccggtctgcggtgcatcgggaggttgaccagtacgaggacgacaatgtgggcacgcaggcgttgaacgagggcgaaaaggcggctggaagtgtccgggatatttccaagagccgttacgccaaaaagctgaaaaagaaagccaagatgcagggcaagaaaggcaccaaaaccgcaaaatcttctgcacaggagccaactgctgcacaagatacaggcgcatccggcaccggcaagggtggctccaactggctttcacgctggaaacagcggcaagaaatccacaaaagctactatgccgccgcccggtccggcacagcggcgcagaccgcaggcggtaaggctgcatccaatggcgcatctgctgcccgatccggcgtggaacaggcggtggagaaaggcaaaactgccgtcagcaccgctgtaaaggggctgatgaatgccgccaagagcaacgcacacgttctggtgatcgtgggcgtttttcttttgctcatcctcatggtgatgtcgggcttttcctcctgcggaatcctcttttccggcggtacgcaggtgtccgggcagaccatgtactctgccgaggaccgggacatccggggcgcagaacaggactacaagaagctggaaaaggagctggataaaaagatcaagcgcactcccaccgaccaccccggctacaacgagtaccagtaccatcttgaccccatcgagcatgacccatggcagctcacttcgttcctgaccaccttgtatgatgactacacccgcagcgaggtacagggaaaactgaaggagaccttcaaaaagcagtacaaactgaccacatgggtggaggtacagatacggtacaagaccgtttgggtcatcagcccggcaggaatcccggttcccacgcaggtgccctatgagtaccgcatcttccacaccaagctggtcaatcgtggcttggaggtggtcatccgggaagaattggatgctgaccaatggaaacggtacgagatctttcaggatacgctgggcggcagaccttatctttttaatggaggcttgccgcccggtggctcggatggctccggcacaccgggcatcgactatcagattccggcagaagccctgacggatgaggagttcgccgccatctacaaggaagctcaaaagtatgttggtacgccctatgtgtggggtggttctaccccggaaacagggtttgattgcagcggttatgtctgctgggtctacaaccagaacggctacaatgtggggcgcaccaccgccaacggcttgtggaacaaaagccagcatatttccgaagccgaagcaaagcccggagatttggtctttttcaaaggcacctacgacacccccggcatgagccataccgggatctatctgggcaatggcatgatggtcagtgccggagaccctatcaagtacgcaaacattcactcgtcctactgggagaagcatctcgccggattcggacggctttcaaaatgattggaggagttactatgagcgaaaaatcggataagctgcgggcaatgctggaaaaagagaaggagcgccgcatcaagctgaacaaccgcatcgagattttggagcggcgcattcaggaggaggattccgccgaggtcaacgagatggtgcggactgcaaaggtcacgccggaacagctcgccgccctgctgcggcagtcggctgccaccaccccgaacccggctgcgctgtctgctgtgggtgcaacttttgagaaggaggtcgatgcagatgaagattaagaaactgggtgcgctgctggtatcggcggcactgtgcgctggcatggcggctcctgcctttgccttcgagggcgaagccgcccccgtggagcagcctatcctgccggaggtggtggaaaatgtagtcaccgtcacggacgaaacctctggtgccctgaccccggagggcaatctgacattggtggacgattaccacaccaattattcggacggctccgggcagcagttcattacgctggtcagcaaatccggcaacacgttctatctggtcatcgaccgcaacgccaaggggcagcagaccgtccactttatgaatctggtggacgaagccgacctgctgacactgatggaggaggaagaagcggacgcttataccgccgaaaaagaagcggcggcgcaggcggaacaggatcggatgaaagccgaggaggaagccaagaaagctgcggaagaagcggcggcatccggcacggaacagcccaaggaaaacaaggtcacaaaaatcgcatccggctttctgggcgtggtggtgctgattgcgctggcggcaggcggcattttctatgctttcacaaagcagaagcagaaaaagcaggccgaaaaagaagcccttgaccccgatgcaaactacaccgaggacaagggcgattttgagattccgaccgatgtgccggacgaggacgaaaccccggacgagcaggacaccgaacccatctgattttaaggcggcgtttgccgccgtacatattgcaatcagaaacagattggagggatttttatcgcaaaattagtcgtggcggaaaagccatccgtcgctatgtcctatgcaaaagtcctcggtgccaccaaccgtcaggatggctaccttgagggaaacggctatctggtaagctggtgcgtgggacacttggtggagctggcaccgcccaatgtttatgatgccaagtatgtcaagtggagcatcgcagatttgcccatcctgccgcaaaagtggcagtatctggtgtctgtgtccaccaaaaagcagttgggtatcctgcaaaagctcatgcaccgcccggatgtggacagcattgtgaacagttgcgacgcagggcgcgagggagaactgatcttccgcttggtgtaccagcaggctgggtgcaaaaagcccttttcccgtctgtggctgtccagcatggaggaatctgccatccgggaaggctttgcccacctcaaaccgtcaactgaatacgatgcgctgtacaacgcagcactctgccgggaacgcgccgactggatggtcggcatcaatgcgtcccggcttttttcgtgcctgtacggtcaaccgctggcggtagggcgtgttatgaccccggtgcttgccatgacggtagtgcgggaagctgctattgccgcctttgtgccggagaaattctacacggtagatctggaactgaccagcggctgcacggcatccagccgccgcattcctgaaaaagccgttgctgaaaagctgatggaagcctgccgaaaggagatggtggcaacgatccagcgcatcactcgcaaggaaaagtccgaaaatccgccgccgctgtacgacctaaccacccttcaacgagatgccaaccgcttgctggggtacagcgcacagcagacgctggactatgtgcagagcctgtatgagaagaaacttaccacttatccccgaactgatagctgctatatcaccgacgatgacnnnnnnnnnnagaactgaccgaggcactggaggtttttctcgacattaccccggaagatgtggatgaagctgtgccccggacacggcgcaccgtcaaccgggaaaaagtcaccgaccaccacgctatcctgcccactcgcagtatgctgcaagccgatctggacgcattgcccaagggggagcagaatgtcctgaagctcatcatcgcccggacgctgatggcggtgagcaagcccttccggtatctggaaaccctgctgaccaccgaatgtgccggggaggaatttaccgccaagggaaaggagattttggaagaaggctggaaagcggtggagcgcaaggtgctggcagacatcctgaaccggaagcaagaactcaccgccctgcccaatgcagcggaaaacgagtgcggcatcctcaacgccgaactgaaagaggggcaaacgtccccgccgaagcatttcaccgaggaccttctacttcatgcgatggaaaccgccagtgcagacagtatgccggagggtgtggaacgtcagggcatcggcaccccggccacccgcgccgcaactattgaaaagctggtgcagaagggctttctggaacggaagggcagcaaaaagaccaaggtgctgctgcccaccgacaagggcaaagccctcatcaccgtgatgcccgaagaaatccaatcgccggaaatgaccgccgattgggaaacaaaactgctgcgaatcgaacgtggcgaaatggagccgagcgaatttatgaccgagatcaatacgatgattaccgaactggtaaagaacacggaaatgaaaaaaggagtgaatgcgcttatgaaaaacaagattattggtatctgcccgaactgcggtgcaaatgttgtggagcgtgaaaagggctggttctgcgagaaccgggagtgccgtttcgtgctgtggaaggacaatgcttttctgaaacggctcggcaaacgcatggacgctcatgtggcggacaagctgctgcgggatggtcgggtccgcctgaaggactgcaagagcgccaagggcaagacctacaacgccaccgtgctgctgtcctgtgaagcggatggccgcagcaagttcagtctggaatttgagaatgggggctgctgatggagcagaaaaaagaagccgtctacctgattaacgatgaacgctatctccacctccgggaaaacggtgcaggggtcggctttgcgacctacaacaaggtgaccggtgagccgctggaaagcgggcaaatttcggaaaagaacctgccgcccgatggacgaaacactatccctgccgcccggaactggtatctgtttgaactttcggacgatgaccgcaaggccatccaacaggaaagcgtaaagatcctcgaaaacatcccgcaggcgggcattggcaggcggcgtatctgggagcctgaaacgctgccgatggatattcggctcatcaacagccactatgatgacctctatcgcattccagatggcggcgtgattcaggtggattacccggatgggcgcagttttacggcacgggtggagcatctggatgattatcactttgacatgggcggtctaggcaatgtgttccacatctgccagtttgccgaagtcatggaacgaaaccatgcagacttctaccctgaaattcagacacaggacgagcaggccgcatgggaactggggggcaaaggttatcttgccatccagtcctgtgaggatggatgggactacaccatttaccacagcgatttttccgtgatggacggcgggcagttggatgccccggaactgaccattcaggaagcccgtgagcagattctggaagcgcaccacatggaaaaggggcggcggctgttgcaggactacgatgccgtcatgaataaagttgcggaagccgaggaactgagtgcagaccatcgcccttccacactggaaaagctggcagaactggcaagtgatacgtctgcgccaaaatcgtctgcacggtccgcgccagaactgtgaggtggacaatgcagcaaaaatggaaccagagttttgacggcgaacccatgacggacatcccgcagaaatttctgaacgcaggatgcgatgtttatatggtgatgcagctgcggcatgacgaaaaaatccttgatgaaagatttgcttctatgcgggagttgaatcgtcgaggcaaaacgcccgacccggagcattacgaggtcacctactatgctgatctgcccgccatgtggcaggatgtgccgaacaacgaggttttggaagaactgtttcaggtgttcaacctctcccgtccgcaggattttgagggacacagcctgtcggtcggcgatgtgattgcacttaaacgcaatggcgaggtgtctgtgcattatgtggacagcatcggcttcaaagatttacaggggtttctggacaagcagccggaacgcccttcggtgctgatgaatctcaaggaaaagtgcgatgccccggagtgcaatcccaccgtctgccggaaagcgagggctgaccatgaactttaaccatgaagaactgatgctgatgatgctctacaacactggcacccgactggggctggtgcaggagttgcgactgatgcagtgctacctgatgcccgacgaaaccgccctgcgagaactgtctgaaaatgtgattgataaattgaagctcctgaccgatgagcagtttgcagagatcgaatttcctatggactgatttttgccgcctacgggcggcgtacatatcctctcttgctccgaaaatttttcataacccgcaagaatgtggtcttgatagtacacttcaattcatgctatactaaaatcagttttattgtacggacaaaaatagaaagcgaggcttgccaatggacaccacaaaacgctctccccttgaccgcctgctctttgccacttttctgaaaggccgcacttcttctcgtgatatatgggaagaaaagggtgatatgacccccgaagataaccagaagatcatcgaggagaccaacgagatcatcactgatgattccacctatccttatctcagttatctgaccaacctgcttgcgaaatccaaaccctccggtgatgctgtcaaaaaactacatgaacacattgacactatcgcaaaaggattgtatgaggacagcaccgacgtgttccgtgcgctccttgcaaaactgatcgagcaaccggaagaaacgcagacctttgaacgtctgctggagatggcagaaaagtttgccgcacgatacgaataaaacgccatagattccataagcgagtgacctgaaaaggccgctcgcttttttgtttacaacgagattgaagggaggaacgctatgccaagcaaaaccgaagaataccttgcccttgcccagcgcacggcaaacggtctgacccggtattgggaacactggacggattatttgactacggcatcccggttgtataagtacagctttgccgaccagctgatgatctacgcccagcgtcctgatgcgactgcctgtgcgagttttgacatctggaacaaccgtatgaaccgctatgtgcgcagagggtctaagggtatcgccctgctcgaccagtccagcagtgtaccccggttgcactatgtctttgatgtgagcgataccggggtgcggcgcaattcccgtgacccggaggtgtggcaacttaacgatgacctgttccagccggtatcggaaatgctggcgcgggaatacggtattcaccacgaacggctcagtcagcagattgcggacattgccggaaagctggcagaatcctactgggataacaacagctccgacattctcggcatcgttgacggttcgttcctgatggattatgatgaagccggacaggaactccagttcaagagtgccgccgcaatcagcatcatgtacaccatcttggaacggtgcggttttgaaccggagggttattttgaccgggatgattttcaggcaatttatgatttctcgaccccggatgcagtctatgcactgggtgcggcagtcagcgattgcagccgggatgtgctacggaatatcgagcgcactgtcaaaacgaccatccgccgccgcaatgtagaaaggagccagcatgaagatgatgaacaggaacgtgacctactcgaccgtcggggattaccagctcccgaacctgaccttgaaccagccgcagaagccgctgggccggtacggacggatgcgccggatgtacctgatggagaatcgcccggtgctgtacaactcgatgctgctgaccgggaagctgcatccgcacctgctggaagtggagcaggcagcggagaaccagaagcagcagatgatgaccgaactgctgaagcagaacccagccccggacaaagcgaagaaccaactgatgtgggtgcaacacatgaacagcctgaaagcacaggtggaagaagtgatcctgatggaactgatttacaactgagttttttcaatctcagcatccctaccgaagcccagcaaattgaagcaatcgaccgagcggagaacgagaaatcgtcctccgctttttccttgtcacaggcagagatcgaacatgaactgcgcaaacacggctccggctttcaggatggcaagcagcgaattattgagctgtaccagacccagcctgacaaaaagctccgtgccaaggcactggcaaaggagtacggcatcggcggtcattcccacgattatctggatggcagtagcggatttgtgaattacgatggaaaaggcttggaatttgtccactacccggattatcagaaaatcccgttgagctggatacaggtggaaaagtatatcgacctgatgattcagtctgatcgttatctgacggatgcggaaaaagagcagcgtactgtcagacaggaggctgagcgtcagctcccgatgctggacggcacggttgccgcagagtacactgccctgaaagagcagtatcctaatactcttgtgggctttgaactgaacggcaactatctgttctatgacaaagatgccgttgctgtggagcagattctgcataccaatcttctgtcacaggaaaatacgctcggcaaggtcaaggtaactggctttccgagtgagcagtgggtagcaaaatccaaaaagctgtgggcagagggcaataacgtctatctggctggcttgaacgaagatggctcccaccaccagacaaaatatctccgggaatcggattatttaccgattggcagcatcgtcaagctggatgaccgggattttcgggtggaacacgttaattttatgttcaaatccgtcagcttgcaggacatggagctgacgaaaaacagactgcccattttccgcaacgagcatctgccgcgcatccgggaactgtacgaagaacagcaggacgcagccattgagctggttcccgaaaaagaggtcagctataaggtcggggacgaagttgtagtagacctttccaccagaacaattgaaggaaccatcggctatgttggtgaaaccgatgtgcgcatcgacaccagtgcgcacggtcattcttgggataacgaggtcatcaaccggcagcagtttgaggagggactgcggcagaaggagccggatgagcctgaactgaccgatgaggaactggatgaactgccgatctctgcggtgattgatggcgaagttcagactttcccgaatgccgcagccttggatgaagccctccacgcagaacctgtgcctgaacccgctaggaattttcacattactgatgagcatctgggcgagggcggtgcaaagcagaagtacgcccggaacatcgaggccatcaaaacgctgttccgtctggaagaagaacaccgtggtgcttctgccgaggagcaggaagtgttggcgcagtatgtcggctggggcggtctggcagatgcctttgaccccaacaaagacaactgggcaaaggagtacaccgaactgaaaggaatgctttcggaggacgagtacgccgccgcccgtgggtcggtgctgaatgcacactataccagccccaccgttatccgtgccatctatgatgcagtagaaaaaatgggattccgtagcggcaatattctggaacccagcatgggtgtcggcaactttttcgggatgctgccggacaccatgcaggacagccgcctgtatggtgtggaactggacagcatcaccggacgcattgcgcaaaagctgtacccgcaagctgacatcacggtagcaggttttgaaaccaccgaccgccgggatttctatgaccttgcagtgggcaacgtcccgtttggcaattataaagttgcagacaaggcatataacaaattgggcttcagcatccacaactatttctttgcgaaagccatcgaccaagtgcgtccgggcggcatcgtggcgtttgtgacttctcgctataccatggacagcaaggacagcaccgcccgcaagcacatggcagagcgtgccgacctgctgggggccatccgtctgcccaacaatgcgttcaaggcgaatgccggaaccgaagtggtttcggacattatctttttgcagaagcgtgaccgccccatcgaccatgagccagactgggtgcagcttggcaaaacggaagatggctttgccatcaaccagtattttgtagaccacccggagatggtgctggggcagctcacgatggaaagcacccaatatggtcacgacctgaccgttgcacccatcgagggcaccagccttgcagaccagcttgccgaggcggtacagcacatcgagggtaattacactgcggtggagattgctgccccggacgtcgcagatgcggaagcacagcgcaaaacgctgcccgcagacccgactgtgaagaattttagctatacggtcgttgatggcgagatctactaccgagagaactctatcatgacgcagatcgaactgtccgacaacgccaaaggccgtgtagctggtatggtggagttgcggcagatcgtcaacgaactgattgaccagcagttgaacgacttcccggacgaggacattaaggcatcgcaagcaaaattgaacgccgcctacgatgcctttacggcaaaatacgggctgatcaacgacaagaaaaatgcccgcctgttcgatgatgacagttcctactatctgctctgctcactggagaatctggacgagaataaaaatctcaagtccaaggcagatatgttcaccaagcggacgattcggccagagcgtgttgtcaccagcgtggatacccccagcgaagcgttggcggtgtccatcggggagcatggcaaggttgatctgccttatatggcagaactgctgggcacacccggtaactgtgagcgcatcaccaccgaattgtccggcgtgattttcaaagacccagctgcggatgctgacgacccggaagcgggctggcaaacagcggacgaatacctttcgggtaatgtacgcgataagctgcggatggcacagcttgctgcggaaagtcacccggaattcaaggtcaatgtggacgcactgaccaaggcgcagcccaaagatttggaagcatctgaaattgatgtacgtttgggtgccacttggcttgccccctccatcgtgcagcagtttatgatggaaacttttcagccgccctatcgtatccgctacaacaatgccatcaccgttcgctactccccttacacttccgaatggcgaatcagcaataaatctgctactggcttcggggacattatggccaccgaaacctacggtacacgccgagccaacgcttacaagattttggaggataccttgaatttgcgtgacagccgcgtttatgataccatcgaggaggatgggaaagaaaagcgtgtgctgaatcaaaacgaaaccaccctcgcccagcagaaacagcaggccatcaaggatgctttcgctggctgggtctggaaagaccctcagcggcgtgccttattggtgaagaagtacaacgagctttttaacagcacccgcccccgtgaatacgatggttcccacattcattttgtgggcatgaacccggagatcaatttgcgagagcatcagcgcaatgcggttgcccatgtgctgtatgggtacaacacccttttggcgcacgaagtcggtgccggcaagagttttgagatggcggcttccgctatggaactgaaacgtctgggcttgtgccagaaaagtctttttgtcgtgccaaaccatttgacggaacaatgggccagcgagtttttacgtctgtacccccatgcgaagctgctggttaccagcaagaaagattttgaacccggtaatcgaaaaaaattctgtgcgagaattgcgaccggtgattatgatgcagttatcatcggacacagccagtttgaaaagatacccttgtccgcagaacgacaggagcgtctgattcaggaacagatggatgaaatcgaggaggccatcgaagaagcgaaagcacaggttggcgagcatttcacagtaaagcagctggaaaagttgcgcaagtctctgaaacagaaactgaaaaagctgcaaggcgcagaccgtaaagatgatgtggttacgtttgaacaattgggcgtagacaggttgtttgtggatgaaagccaaaactataagaacttgttcttatatacgaagatgcggaatgtggccggactgagcacatctgaagcgcaaaaatcctccgatatgtttggaaaatgccgctacctcgatgagatcaccggagggcgcggtgttatttttgcgacaggcacccctatcagcaacagcatgaccgagatgtataccctgatgcgctacctccagtacaacaccttgcagcagaaagggttgacccattttgatgcgtgggcatccaccttcggtgagacgaccacggccattgaacttgcgcccgaaggcaccggctaccgggcaagaacaagattcgctaagttcttcaatcttcctgaactgatggcgatgttcaaagaagcggctgatatcaagaccagcgatcagcttcatctcccggtgcctgatgcaaaatttgagacggtggtggtcaaaccttcggaaatccaacaggatatggtgcaggcgttgagcgaacgtgcagccgaagtccacagtggttctgttgacccttctgtggataatatgttgaaaatcacgtcggatggccgcaaaatcggtcttgatcagcggttgatgaattccgctctgcccgatgaccccaacagcaagttaaatgcctgcgtcaacaacgtcctgcgcatctgaaaacttatcagcatatggatatggtcagggcaggcctccgcttcaatgatttcaatacctttttgttcgcacaactggcgcagtatctgccctatatcctttttgatctgaccgtaaattaccattctccgatatttcggtgcaaacactacatggtattgacatctccacgtggtatggcttaaactatctacgtctttgttatctttcatttcaaagataaacctccctgttcctagaatgtggttggcaaacccacactctattctacggggaggtttctctttgtctagggctaaagccgtttttattccaccagcaggtagcggagaaattccaatcgaacccggagatagctggttctccccgaaatagttttaggactagcctcaagttagatacctggaggtaaagcactgaatagcctagcggccgagaggttagcgaagcttatcaaactcagaatgccagagtattgatgcttgggagtcagacagtgtcagataaatgtcattgtcaaaagggaaacagcccagatctacagctaaggtcctattgtagcttaggaacgagatggaatggaatatggctggctaccatatccggttccaaatatattgtaataggcaggtggcaacggttagaaatgccttgcgttcagcgccgcattgcagtatgattataatatcaattatctgacccttacccctgagcaggcagaaccatttttgcaaatgaaatcgttctgcatgataaagaagagagcaaaaacaataaaacatacaggaggaaattattatgggtttgatcaaagcaggtatgggcgcactgggcggaactcttgcagaccagtggaaggaatttttctactgcgattctctggataaggatgtgctgatggtcaagggccagaagcgcacttcccgccgcagctccaaccacggcgaggataatatcatcaccaacggcagcggcgttgccgtggccgatggtcagtgtatgctcatcgtggagcagggccgtgtggtggaagtgtgcgccgagccgggcgagtataccttcaattcctccaccgagcccagcgtgttcaccggcaacttcggcgatagtctggcagccactttccaaaccgtagccaagcgctttacctacggcggcgacaccggcaaggatcagcgggtgtactacatcaacaccaaggagctgggtgagatcctgtacggcaccgcaacgcccatcccgttccgcgtagtggtcagcgaggagcgaggctacaagctctcggtgaacatccgctgcaacggcagctttacttaccgcatctgcgacccgctgttgttctacaccaacgtgtgcagcaacgtctccacccagtacgatgcctcggagctggctccccgcctgaagagtgagctgatgaacgccttgcagccggcgctggccaccctttctgccaacaaggtgcagtattacgagatccccgcccatacgctggagatctccgaggcgctcaacgagcagctgtccaacgtctggcgcaaaaagcggggcattgaggtgttctccttcaacatcaactctctgtccatcccggaggagcagcagaagaagatcaccgagtgggaagaaaacgccatgaccaccgatcccaccaccgccgctgcccgtctggtgggcggtcagatcgacgccatgaagaccgccgccgggaacactgccggtgccatgaccggctttatgggcatgggcatggcagccggtgcaaacggcatgaacgcccagaacctgttcgccatgggtcagcagcccgcagcaccccagcagcagacttctgccgccgacagctggaagtgcagctgcggcgctaccgttaccggcaagttctgcccggaatgcggcagcaaaaagccggagccgaagcctgcagacagctggacttgcagctgcggtgccaccgtcaccggcaaattctgcccggagtgcggcaagccccgcccggcggcagcagagggctggacttgcagctgcggcgcggtgaacaagggcaagttctgctccgagtgcggcaaacccaagcccaccggtacgcccaagtataagtgcgacaagtgcggctgggaaccggcagaccctgcacacccgcccaagttctgcccggagtgcggcgacccctttgacgaaaacgaccgcagctgaacccggcacacaatgaccgatcacactgcggggcagggaaggagcctctgctccgcagatcataggaggaaacgctatggcaggaatgctggaatataagtgcccctgctgcgatggtgcgatccagttcgacagcaccacccagaagatgaaatgcccttactgtgacaccgagttcgacgtggataccctcaagggctatgacgaggagctgaaggacgaaaagcccagcgagatgaactgggccacccccggcggcagctgggcagagggcgagaccgccggtctgcatacttatgtctgcaagagctgcggcggcgagatcgtgggcgacgacaccatggcagcctcggcctgccccttctgcggcaaccccatcgttctgaccggacagtttgccggagacctgcgccccgacctcatcatccccttcaagttggataaaaaggctgccaaggcaaaattgcaggagcacctcaaaggcaagaccctgctgcccaaggtgttccgcagccagaaccatatcgacgagatcaagggcgtgtatgtgcccttctggctgtacgacagcgatgccgacgcccagctgcgctttaccgccacccgcacccgcttttggtcggatgacgactacgattataccgagaccagctactactccgtgcgccgggacggcgtgctgggctttgacgcggttccggtggacggctcctccaagatggcagacgacctgatggaatccatcgagccgtttactatgagcgatgccgtgcccttcaagacagcgtatctggcgggctatgtggccgataagtacgatgtggacgcccaaaagagcatccagcgcgccaatgagcgtatccgtcagtccaccgaggacgcctttacccagaccgttaccggctacgactccgtgaaaatggaaaacagcagcatccagctgcacggcggcaaggcaaagtatgccctgttcccagtgtgggtgctgagcaccagctggcagggcaacaactacatttttgccatgaacggccagaccggcaagtttgtgggcaacctgccggtggataaggccgccgcccgcaagtggacgctgggacttacggcagccgtcggtgctgcatcctatgcggtgatgtggctgctgtggctggccgggattctgtaaaggagggacggaagatgaaaaagactgttaccccgctgcgctccctctgtgctgcgttggccgcactgatgcttttgctggcgctggctgtgccggcctttgccgcagacggctttgccgacctgtattaccgcgtgaacgacagcgcagaagtcctgaccgaggatgaggacggcgagctggaagcttcactggaggaactgagcgtccgccagagctttgatgtgatcattgctaccatcgactcgctggaaagcgagggctgcaccagcatggaggaatatgccgatgacctgtatgattactgccagttcggctacggtgaaaaccgggacggcgtgctgctgctggtgagcataggcgaccgcaaatggcatatctccacctgcggctacggcattaccgcctttacggatgccggcatccagtaccttggcgagcagatgacccccgatatggcagacggcgattacgccgccgccttccacacctttatccagtggacggacgcgtatgttaccgccgcccgcgaaggccacccctacgatgtggacaatatgccgcatgagcccctctccatcctgtatctgtgtctggcgctggtcattggtctggtgacggcactgattgtgaccggcgtgatgaagagccggctcaagagcgtggcaccgcagcgggacgcaaccagctatgtgcggcagggcagcatgaagctgaccaaccaacgggatctgtatctgtaccgtgaggtccaccgcaccgagcggccaaaggagtccagctccagcgactccggcggcagctccactcacacctcctccagcggctccacccacggcggcggaggcggctcgttctgaaaacgttccccgcaagataaaatctcaaaaaccgatccgcagcagccggtcgcacccgcgccccggcaaccgctgcggatcggtttttacttttctgccgcccgacacaaacgactgattttttctgcgcctttagggctatacttccagtgcagacgattttatatgcagcaaggagcagacacatgggcatttgggaaaatctgggcatgggcagttaccggggcttttcgcgcccggcagcgcggctgttgcagcaggcggtgcagctggcgggagatctgggctgtgaacaggcggataccagccatcttttgctggcaatgctgcagcagcagggcgctgcggcgcagttcctcacccggaaaaacattaccgagccggaggtgcgccgccagctggcgcagcggcgcagcgccccggcacagcggctggaccggcagtccatggcaccggacctgcgccgcaccatggactatgcgctcattggggcgcaaaacgcccacgtcagccgggcagagccggagcatcttctctgcgccatgctggaagatgacggctgcgccgccgggctgctgctggcggagatggggctttcgctcaccgaggcggtgcgggagtgccgccagctgagcggacagtttgtgctgcccgcccagccccgggtgtcggccagcatcccccggggcagccgcgccagcgataaatactgccgcgatttgacccgccgtgccgccgaaggggagctggacccggtgttctgccgggaagcggagctggaccgcatggtggagatcctgtgccgccgccagaaaaacgacccctgtctgatcggcgagccgggcgtgggcaaaacggcgctggccgaaggtctggcgctgcgcattgccgccgggcaggtgcccagagcgctgcaagggcggcggctgctggcgctggatatggccagtctggtggcgggcaccaaataccggggcgattttgaggagcggctgaaaaacctgctggaagagctggtgcgggacggcactgccatcctgttcatcgacgagttccacaccatcgtgggagccggtgccgccgagggtgctattgacgctgccagcatcttaaaaccggtgcttgcccggggcgagttgcagcttatcggcgcgactaccaatcaggagtttcgcacccacatccagaaggacgccgcgctggagcgccgctttggccgggtgcaggtggaagaacccacccctgcgcaggcggtggagatcctcaacggccttgcgccccgctacgagcggtatcatggcgtgcgcctgccgccccagaccctgcaggcggcagtggagctttcggtgcggtacctgcccgggcgctgtctgccggataaggccattgaccttgtggacgaagcctgtgcggcggcgcgcatccttgccgaaaaggagcagcgcacccagccggtgctcagcccggaggatatcgcccgggtggtggcagcggccagcggcgtgcccgcccagcgggtgggcgagcaggagcgggagcgtctggacaagctggaaagccgcctgaacgccgagatcgtcggccagcagcgagcggtggcggccgtggcgggggctatccggcgcagccgcaccggtttgggcgagccggggcggcccatcggtgctatgctgtttttagggcctaccggcgtgggcaagaccgcactggcgcgggcgcttgcggtcagctggttcggcagcgagaaggcgctgctcaagttcgatatgtcggagtatcaggagcagcacaccgccgcccggctgctgggtgcgccgccgggctacctcggccatgacgagggcggtcagctgaccgaggccgtgcgccgccgcccgtacagcgtggtgctgtttgacgagatcgaaaaggcacacccggatatccagaatatcctgttgcaaattttggaggacggtcagctgaccgatgccatggggcgcaaggcagattttcgcaacaccatcgtgctgctcacgtcaaatttgggcgcacgcttcttagcggggcagaacgcgccgctgggctttgccgccggggcagaagccgtgtttgaaaagcagtccgcacaggctgtggaggaagccaaaaagtggttccggccggagctgctggggcggctggacgaggtgatcgtgttccgcccgctggcggaagaaaacctctgcgccattgcagaaaaaatgctctgtcagctggagcagcgcgccgcccgcagcggctaccggctgcgccacaccccgcaggtgggggcggcactggctgcccgggcgcaatcggcctatggtgcgcgggaactgcgccgtcaggtggacagggcggtggagcaggcacttgcgaaccgcattgccgccgggacggcctgcgtggggcagcactggacagcagactgcgccgccgatggcagcatcattttgcgggaggatgaaaccataaccctataaaaaatagcaaaatagcgcttttgcttgcaaccggcgcggttttcgactattatagaggaaatagagttacaacagggaggaccccgatgcacacgctgtttcttctgaaccccgcagccggaaaggccgactgtacccgcaccctgccgcagcagatcgcggcagctgctgccggtgccgggcttgccccggaggactacaccatccgcgtcaccactcacgcaggccacgcccgggaactgtcccgtgcagccgcagctgccgcccagaaggccggggtggagttgcgcatttttaccgccggcggcgacggcaccttcaacgaggcgcttaccggtgcccacggctttgataagaccgccgtgggttgcctgccctatggcagtggtaacgactttctacgcacctacggtacaaaggaggagtttctggatctggacgcccagctggccggcggggtggtgcccatcgacctgatgcgcaccagtctggggctttctgccaccatctgcgccgccggtctggacgcacaggtggcctacggcatccccaagttccggcgcatcccgctgtgcggcggcgaggcagcctatgcgatgtctattgttcagcagctgtgcgggcatatcggccgcagggtggagtacgtcattgacggcgaggtgctgaccgtggactgtctgatgtgcgcagtgtgcaacggccgcgcctacggcggcggttttatggccgggccggaggcacagccggatgacggctggctggatgtgttcatcgtgcgcaaggtcagccgccgggtcattgcaaagctgctgatgctgtacaaaaacggccagcactttcaaaacggccaactgaccgaggctgcaaagccctactttatttatcgccgcgcaaaatcggtcagtctgcgggcagcagatggccgtgggcccatcattgccaccgtggacggtgagtgcgccccttgcaagcaggtgtcggtacaggtgcagccgctggcaggccgcgtgctgctgccgctgcccgcctaccagcgctttaccaccaaaaaggcgggcgtgaagtaaaaaataaatcatcagacccaaacaaggccgctgcacattgttccgtgcagcggccttgtgttttgcttattgttttgcaaggcgctgccgtaccctgtgctccagcgccttgtaaaagctgctcaggcagagcgtgagcagatatacggtcagggtccagaccacaggatgtaccgtaaggctgaacttgtccgcagtccactccatataccggatcagcacctgatggatcagaaaaccgtaaggggacagcccggccatccacaaaaacggctttgcggaaagcagccgggaaatgattcccttgcccacggcaagcagccagaccagcagcaccgcagagggtgtgaacagcacgttgtaccggaaggccaccgcgcccagaacccccacctgcttggcggcgataaacaggcagccgcccgcaagcagcacagcggcaagctccagcagggagaaagcaccgcctggcaggccgctctcctgtttgcggctgtggtaaaggcagcccatgcagcagctgatggtaaaatctcccgcccggaacacagggcacagataggtcaggtaaaaggcggcctttccgctgagcccggctttccagaccgcaagggagaaaagacactgcacgcagaagattacggcggcaatgcaacgcagcctgcgggcatcggcctttttcagcacgacgagaagcggggggaagatggcatacagaaaagcctgtaccgaaagataccacgccactccgttcaggcagaaccagaaacggctggaggggatccatgtttgcagcagaaaaatgcttacaacaagctgcgccgcacaggagagcaccccgcgggcagagggctgcgccagaagccacttcagcacaaataacaacgcggcagccatcattataaggtgcagcggatacagcttgcgtattttttgcagagagaaagctatggcggaccgcagtcccggtgctgtgcggggacggtcgtaatagttgcaggtcatcaaaaaaccggacagcgccacgaataccgtgatcgcccacggccccagccacggtgtcccgcaatgggagagcaccacgctcagaaatgcgactgcccgcagcccctgcaaagatgagatcagctttttgtctgtcacggtatcctccgttctgccgcaaagcgcgtcagctgtgtttttgtaatgcgttataagtataaaaaaggcggcgcgtcctgtcaagaacacaccgcttttttgcgtagtagggtgcgatttttgggcgtcataaattcttaacaaagaaaaattgcaaaaccccttgatttttcagagcaagatgagtacaatacaattagcactcagagaaaatgagtgctaaaccgctgcggagcacacacgaagcccccgcaggacgcaacaaagtttcaaataaattcaatataattggagggcaagaattatgaagatcattcctcttgcagaccgtgttgtcattaagactgttgaagttgaggagaccaccaagggcggcctgatcctgaccggcagcgcaaaagagaagccgcaggtcgcacaggtcattgctgtcggccccggcggtgtcgtggacggcaaggaagtcaagatgaccgtcaaggtcggcgacaaggtcctcaccagcaagtactccggcactgaggtcaaggtggacggcgaagagtgcaccatcgtgcgtcagagtgatattctggctgttgtggaagactgaaactgaattttcccttttcaattgagcttgtattataaaggagcgatgtattatggcaaagcagatcaagcagggcgagaacgcccgcaaggcactgtgtgccggtattgataccctggctaacaccgttaagattaccctcggccccaagggccgcaatgtggtgctgggcaagaagttcggcgcaccggtcatcaccaacgatggcgtgaccattgcaaaagagatcgagctgaaggacgagttcgagaacatgggcgcacagttggtgcgtgaagtcgcaaccaagaccaacgatgccgcaggcgatggcaccaccactgctaccgtgctggcacaggccatggtcaacgagggcatgaagaacgttaccgccggcgcaaatcccatggatatccgccgcggcatgagcaaggccgttaccaccgctgtggagaccatcaaggcacacagccagaaggtgaaggacagcaacgatatcgcccgcgtcggcaccatctctgccggcgaccccgagatcggccgtctgatcgccgaggctatggagaaggtcacctctgacggcgttatcaccatcgaggagaacaagaccaccgccgagacctacaacgagatcgtggaaggtatgcagtttgaccgcggctacctgaccccctatatggtcaccgataccgacaagatggtggccgatctggacaacgctgctatcctgatcaccgataagaagatcagcgtcattcaggatctggttcccctgctggagcaggtgatgcagaacggcatgaagctgctgatcgtggctgaggatatcgagggcgaggctctgtccaccctgatcgtcaaccgtctgcgcggtaccctgaatgtcgtggctgttaaggctcccggcttcggcgaccgccgcaaggagatgctgcaggatatcgctaccctgaccggcggcaccgtgatctcctctgatctgggctacgagctgaaggacgcaaccgtccagatgctgggtcatgcccgtcaggtgaaggtgaccaaggagaacaccaccatcgtgggcggcgcaggcgacaaggacgccattgcagctcgcattgcccagattcgcagccagatcgaggccgctaccagcgactttgaccgcgagaagctgcaggagcgtctggctaagctggccggcggtgtggctgtcatcaaggtcggtgctgctaccgaagtcgagatgaaggacaagaagctgcgcattgaggatgcactgaacgctaccaaggcagctgtgcaggaaggtgttgtggccggcggcggtaccgctcccatcaatgccatccccgctgtgcgcgccctgtgcgatacgctggagggcgacgagcgcaccggtgccaagatcgtgttgaaggctctggaggctcctctgcgccagatcgccaagaatgccggtctggagggcagcgtcatcatcgacaagatcatctctgccaacaagcctaactacggcttcgatgcccagaacgaggtctttgtcgaggatatgatcgccgcaggcatcgtggacccgaccaaggtcactcgctccgctctggagaatgcagcttccgtcgctgagatggtgctgaccaccgagagcctcgtggccgacctgccggaacccccggctcccgccgcacctgccggcggtgacatgggcggcatgtactaataactgcctaaaaaccgcatgaatccttgatttttggagtgcgcaaaagcggatttacgccaaacttacgccacttacgccaaaaatcaaagcgcactatagggtaacaaaatcggcactcgctgaaaagcgggtgccgattttttgtgtctaggggatttgaagactcatgaaacccactgatggattctgcgagcggcagactgtcagcggctttattgttgacgaaaaacaaaggtagggatacaataaaaaaagaatgtaaaaccggaagggagagtgccgccatggaaaatcagagggatttctgcacagaatgccgcagagaaacgagctacaccctgaagaaaatcaaaatcaaccggaccatccgggaaaaggagtatacttttgagatcacggctgctttctgcaacaaatgcggcggcgaaatgggctaaagaagcatactgcaacaatgatataaaagtagtttcttttcgtgtgaggtagaatcaatggatgctgactatgttgaaaatatcattcgaaatattgataagcaatcttataaatgtatcttggttgatggcgcttggggaattggtaagtcctacatggtaagaaaagcgctggaggatatgaaggacagaacgtgctttatctcactttttggaatggatgatgttcaaaaaatataccatgaagcattttttcaattggcattgcgtacttctcatgggggaaaaatcgcaagcggggcaaaaggatttgccaaagcggccggtaatttttgcgcagaggttgcaaacttgaatggtgcacttgcacaagcgatatctgaaagagaactatttgcggttacagcaagcaattttaaaaagaatagaattatcgtcattgacgatttggaacgccgaaaggctggattggatttagaggaactctttggagtgattgaggaactaaagcagtccaactatattaaggttattcttattgccaattcaaatgaaattcatgaaaatgaaagaactacgttcaataagtataaagaaaaaactattgatcgtatctttgaggtaacggaacactcggcatcgattaagtggggagtgtatggaatagatggagaatttattgatgtctttttgatgcatcataaagcaaaaaatttgagaacattgcaaaaggctcaaaatttttataatgatgtgaaacagtattgcctgaaaatagaaaacgaacaatttatgaacgaagtaaagatgctctgctttgctgttgttgtagaagatgtagataagttatactataaaaacgattcaatagagaaagaaaatactaacagcagataccggaaagatgggcatatcttgagcaatcatttaaatgtccgacttgcaaactatgtatatcttcaatctagtggcgcattattggatgatatctataactactttaaaagctctaagatgcttagtgaagaaacccttcaaaaacattatcaaaaattcaaggaagccggtgataaagcaaattattacaaaactgatgaggagatagagacttacattcaaagttggaaggcaaaattacatgaagcatcaaatagtgtagaattgacgcagttggcaggggaatatgattattggtttcaggtgttggaaaaagatgatgacgaacttattgaatattacagagatgttttaaaaaacatgtttttatgtgagaacagaagcgataaaagaagtccattggactattataatagcaatgaattccatggcgcaacagaaaaaattcgtaatatatatgaagaagtacttaaacaaacgaaaaaagaaattataagaacatatatcgagaaacttggtggtagcctggatgaagaaattgcatatgagtattcgtactggcttaaggactggtatacaggaacgctagagatgcatcgctatattgatgaagaaattgatcccttgtatcaaagaaattcgttccctgttgataatatgtcaaaaaccaaaaaaatggtttgttataatattatgaccttgttatatctacatgataaagaaaaacttgaaaaatgctataatagtttgaaatctgactttagtaaaatgggaataaaacgaacagaggacattttgaaagaaattcgagaagataattagtttataggtaaaacagccgcccagcgaccttacggtctcgctgggcggcttattttttgcgtttccacaacagatattcttcgtagcggtgcatctcgttctgttcttcttcggtcaggcgctggcgctgtttgcgagcctcgtccgaggggtcgatgtcggtcagacccagcaggtagtcggcggaggtgccgtagagcttgcagatggcaagcagcgcgtcactaggaggcaagttcttttcctgctcccatgcacggacagcccagacagaaaagccaatcttatctgcaaggatttgctgtgtgtcatcatttaacttgcgaagttcagccagccgttccccgaacatagttttcccacccttctttacctactagtatatgtggcactactactttctataaaaagtggtgtaaatatgctagacatgaacaaaagtagcagtataatactagtatagggcgaaactagtgaaatgatgctacttccgccgcaacgctaaggcaaagcgagggaatccccgttggaacaactgatcgattttcacgcaccggaagtgcaggcggtgctggatacgctactaaaagataaatctaccggtaaaaacatcatctgggcaaccgacccgccggaggaactgcaaacggtgatgtacgaacctgtcacggacaaatctcagatcaccacccagcagctcgggctgacccactacgaggtggtgctgccccggatgatgaagcagaccgacacccagcagcagcgcacccgcaaaaagggcgaagtattctcgcccgcatgggtctgcaacaagatgaacaacgcactggacaccgactggttccgtgtgctgggggcaggggagagcgccgggcagttcacggtggagctgccccaaggctggcagacggtggaaacgccggtgcagttcccggcttgcgggggcaagactccggcatgggtgcagtatgtgcagagtcgccgcttggaggtgacctgcggtgaagccccctttctggcgtcccggtacgatgccgccaccggcgagatgatcccggtagcccggcgcattggcattctggaccgcaagctgcgggtggtaagcgagaacgccgccacagaggacgagtggcgcaaatatgccacccatgcggtgcagtctacctacggctatgagtatcagggcgataaccttttgctggcgcgggtcaacctgctgctgacctatgcagagcatctgcaagcccgctggcagcgcaaacccacaaaagaagagttacagcctatcgccaacatcatcagctggaacttgtggcaaatggacggtctgcacctctctgtgcccggtggcaagccccagccggagacagaacagcttgacctcttttccatgttcggggcggcagagccgcagccgcccacggtatcctgcaaagtgaaaaactggcgcaagggcagccatggaacgacccggaactttgaaaccattcaggaagggagtaccagcatgaagtttgattatgtcatcggaaacccgccgtatcaggatgaaacccttggcgataacaaaggctttgcaccgccagtatataacaaatttctggatgcgtcttatgaaattgcagataaggtggaaatgattcaccctgcacggtttttgttcaatgctggctctacgccgaaggcatggaatgagaagatgctgagtgatccacacttgacagtcttgcattatgaatctgatagttcaaaaatttttgcaaacacagatattaagggcggtgttgtaattacataccgcgacaaagtgaaaaattacggtgcgattgagcattttattgtgttcgatgaactaagaagtattgctcgtaaaattggaaaaacagactatgtaccgttaagtaaggtgatttatgcagcagaatcgtatcgtttcacagaaacgatgcacgaagagaactcaagcgtggagtctctgctaagtaaaggtcataaatacgacttcaagtcgaatgttttaagtaaactcgataatattgtgttcttctctgaaatgccgaaggacggaagttcttatataaagattttgggtctggacggaagcaagcgcacagagaaatggattagaaaagattacgttcgtgtccctgaaaattttgggagttataaggtttttatctccaaagcaaacggtagtggtgcttttggcgaaactctctcagcaccgataattgctgaaccgggcataggacatacgcagacatttatgtctattggaaaatgtgaaagtgaacaagaagctatcgcaataacaaagtatgtaaaaacaaaatttgcaagggcaatgcttggggtactaaaaattacgcaggactgtccggcaccaaaatggaaatacgtcccccttcaagactttaccgcccattccgacattgattggagcaagtcggtggcggaaatcgaccggcagctttaccgcaagtatgacctgactgcggacgagatcgaatttatcgagacccatgtaaaggagatggcataatggctggcataaccctgcgcactgcccggcaggtagtgcccatgatctacgcctataccaccccggaaattgcccggcacaacggctggacgaagatcggctacaccgagcagtcggtggacaaacgcctgaaacagcagacccacaccgccgatgtgctgtaccatgaggagtggcggggcaatgccgtctacgatgacggcagcggcgaggtgttcaccgaccacgatttccacgcctacctccgcaagctgaaggtggagaacgaccgcaaaaacgagtggttccatctggatggacagcagtcccggcggtattttcaggatttccgcatgaaccggggcagggtgcagctagatgccgccatcgcctataccctgcgggaggagcaggcaagggctgtccacgacaccaaaatctattaccagagccaccccggcggggaatacctctggaacgccaagccccgctttggcaagaccctttccgtctacgacttctgtaagcaggtcgatgcacagacggtgctcatcgtcaccaaccgccctgccatcgccaatagctggtacagcgactatgtgcgctttctgggcagggagtccggctatctgttcgtcagccatgtggatgcccttgccgggcagccccatgtgctggacgagcaaggctatctggatgccgccgcacagggcgagaaactgtataagcgcattgagtttgtcagcttgcaggacatgaaaggctcgaaatatttcggcggcgagtacgacaagttgcgccacctgaccgagctgaactgggatgtgctggtcatcgacgaagcccacgagggcgtggacacctacaagaccgaccttgcctttgaccgcatccgccgccgcttcacgctgcacctgtccggcacgcccttcaaggcactggcgaacgacaagtttgccggggatgccatcttcaactggacctacgccgacgagcaggccgccaagcggaactggcagggcgcaccggggcagcagaacccctacgcaaacctccctatgctcaacctctacacctaccagatgtccgagatcatccgggacgaaattcggcagggggtagagatcgacggcgaaacgcaggaatttgcctttgatctgaacgagttctttaaggtgaagtcgggcggcagctttgagcatgaggccgaggtagaccgctttctggatgccatgactacccagaacaaatttccgttttccaccccggaactgcgtgccgaactgaagcacaccttctggctgctgaaccgggtggacagtgccagagcgctggcgaaaaagctgcaggcgcacccggtattccgggactatgaggtgatcctagccgccggtgacggcaagctggacgacacggacgagaaccagaagagctttgaccgggtaaaagccgccatcgcccaccacgaaaagaccattaccctgtcggtggggcagctgactaccggcgtgaccatcccggagtggtcggcggtgctgatgctctccaacctgaaaagcccggcactgtatatgcaggcagcgttccgtgcccagaacccttgccttttccacgaaaacggtactttccgccgcaaagagaacgcctatgtgttcgattttgaccccgcccgcaccctgctgatctacgaacagttcgccaacgacctttcacaggacaccgccagcggcaagggcgacaccgaggagcgcaaggcgcacatccagaatctgctcaacttcttccctgtcatcggcgaggacgaggaaggggagatgatcccgctggatgcagaaaaagtcctcagcatcccccggaagatcaagtccaaagaagtggtgcggatgggcttccagagcaacttcctgttccagaacatttccaacgtgttcagtgccccgcaggaggtgctggacattctgcaaaacttccagcccatcagcgaggcaaaggcaaagcccatccagatcaccccggagaccggcgcagacctctccctgaacgacaagggcgaggtggatttggacgagggctacgtcatcggcaaggcggcggatgtgttcggggagaagatctacgaaagcaccccggcactggacaccgccctgcaagacctgaccgatgccccggctcctgccaaagaagagcatctggaacccctgaaaaagagtatcaccaaggagatcatcacccccatggtggagcaggcaaagcaggagtatggccgcgacctgaagctgtccgaccagaaacggtttgagagcaccgccaaagccaagatggacgtggcggtgaacaaggtggtggacaactaccggatcgaccagagccagttggagacccagcgcactcagcagctgcaaagctgcaccacggcccagcagcgccagcaggtgaaccgggagtttgacgcaaagcagcagcagagcaccgccgccctgatggagaccctgcaatccaccatccagcagacggcgcaggagatgcagcagaccattgtgcgcaccgtggagaccaaccagaaggagcaggagaaaaagggctacgaggacaccgtccgtgaccatctccggggcttttcccgcaccattccgtccttcctcatggcctacggcaacgagaccgtgacactggcaaactttgatcagatcatcccggacaaggtctttcaggaggtcaccagcatcacactggagcagttccgctttttgcgggacggcggaccgtacatcaaccaagccaccggacaggaggagcattttgcaggtcacctgttcgacccagtggtgtttgacgattcggtgaaggaattcctgaacctgaaggtcaagctggcggattactttgacgagagccgcaccgaggatatcttcgactacatcccaccccagaaaaccaaccagatctttaccccaaagtgggtggtgaaaaagatggtggatctgctggagcaggaaaaccccggttgcttcgatgaccccggtaaaacctttctggacccctacatgaagtccggcctgtacattacggaaatcgtcaagcgcctttaccgcagcgagaagatgcggcaagccttcccggatgataacgcccggctggaacatatctttgccaagcaggtctatgggcttgcgcccaccgagatcatctaccgcattgccatcagctacattctgggctttgcaaaggatcacggcatcaccgcccaccatatccgtcaggcggatacgctggaatttgccaaggcgggcaccatggaaagggaactggataagattttcagagactgacaaatagaatacggcataaaaccaaaggcggctgtctgcatgggtgcagatggccgcctttttgctatttaaaaatattttgaaatagccttgtataaagagtacatgtgtgatacaatctatttaaagattgtttgaaatagattggtgcgtgatcgcttggctataaatgaagtattagctgctttagcagacgatacacgtcgaaaaatcctgctaaagttacaggaagggaaaataagttcaggagatttagcgatcgcattggatatgacaccacaggcattgtcataccatttatcgaagctgaaaaaagcagacttaatttacgaaactcgatacaaaaattatatttattacgaattgaatttatctatccttgatgaaacaattatgtggatcagtaatttgcgtggaggtcaacaatgaaaaagaaaatggtcgctttttacagtctcatgtttttaccattggtagttgtcctgattgccttacagttcttgccagagcaaatcccggctcattatgatatgaataatcaagtgacacgttggggtagcaaatatgaaacactaattttccctgtaattacagttttatttggctattttatgcttgccatggctaagttgtcctcaaaacaagaagaaaatggaagtaataacaaaaatgtatgtattgtgattggaatagcatctcttgcacttttcaatgctatgacagtctattttttatatgctgatttcaattcaattgaaaatctgtcttccattgcacttgatttgaatcaacttgtatttggactgcttggcgttgcaatgattatattaggtaacattatgccaaaactacgaatgaactcagttgtaggactgagaagtatatggagtatgaaaaatgaaacaacatggaaaaaaggccaacgctttggaggtatttcatttatcgtaagtggtattattataatcatggtatgctttttgacgaaaggcatttcttgtttttggtggacaatgagcatcgtagcaattcttttgattgttgacacctactatacctacacattatcaaaaaaatactaatgccgcaatccgtgattcacgagatgctatatatgaaacaccctacaagactaaaaatcttgcagggtgttttcttgtgctctaatttatatgtaaccagccccgaaaccggggctgaaaatttctccgaaataacggatgtggaagcccagcagctgggctttcccttctgatggacagcggttacacggtcagttacaggtttggttacgctgcagttacagcgcaaaaaccgcatgattgctgcgttttccgctttctgtaaccatgtaaccttaaaaagataagaaaaagtataaagtccatcgaatgtcctgcgtacagaaaaagagagtttccctgcccggttacaggcgttcggttacaaggaattggaggtctgcctatgaaggaagttcgcgtttgcgaagcaatgaagtccccggtggggactttaagcgatgaaatggtcttgcatcagcaagatggagggaccaagtcccgacaagttccgatctgggaaaagagcaacctgacgctggaggaagctgcagcatactccggcattggcatcaataaactgcgcgagattaccaacgaggataagtgcaaatttgtcctttgggtgggcaacaagcgtttgatcaagcgccgtctgtttgattgctttatcgagcaggcgtattctatttgagaatgatgcaacgtcttttctattcgatatcggtggaaatcgcatggtcggtatggtatactaaaattaatccctatatgcgcttttcacagaaaggagtttctaaatgtctgaaaagcgcaaagatagcaagggccgtgttttgaaggatggcgaaagccagagagcaaacggcacctacgactatcgttataccgatatccacaagaaacggcgttgtatttacgctaaatccctgacagagctgcggaaaaaagaggaagaactgtggcgcgatctggcagacggcatcgactacgccgccggagagatgacggtggctgatctggttgaccgctatatgaacctgaaacgtgggttgaaacccaattcacttcggtcgtacaacacagcggtcaagcggattcatgctgatcctttcgggcaaaaagccatcaaaacggtaaaattgtccgatgcgaaaggctggttcgtgtttctgcatgacagcggtttcaagcaaaacaccataggaatcctgcaaagcgttgtcagaccggcgtttgagatggcggtagaggatgacatcatccgcaagaatccatttaagttcaagctgtcggacgttgtgccaaaggacgcttatgtgcgcaatgccctgaccagagaacagcaggagaaatatctgcaattcgttcaggactatggcggcaactattatgatgatatcgtcattcttatgggaaccggcttgcgtgtgagtgagttgtatggcctgacacgagcagatatcgactttgaacggcactgtatccatgtccggcggcagctttgccggacggctgaaaagccctactttgtcacaccgccgaaaacaaaaagcggtatccgcaatgttcccatgacagataccgtttgtgcagcgttgcggcgtgtagtaaaagctagagcgtccacgaaagtggaagcgctggtagatggttgcagcggatttctctttctggacaaatccgggatgccgaaggtggcaatgcacttggaaaactatatgcgtggcgtgcagggaaagtttgagaaggcgtacagcaaacctgttccgcgcattacacctcatgtgctgcgacacaccttctgcaccaatgttcagcaggccgggctggatgtaaaaagcttgcaatacctgatgggacactccaatgccagtgtgacgctggatgtctacacgcacagcagctttgaatcggttgagaaggcctttgaacagatcgccggcaacctgtgattttcgacgcatgaagcggaattgcttacgccgaaacttacgccaaaacttacgccaatcacccggtaagtggcgtagatttgcgtagaaaagcgtggatcgtgcaaaaacggagaatctggaaaaatcggctcgtggccttgataattctacaaaagtctacgtttcccgatattcgtgactcggctccaaaagtgtggtttggaagggcggcatgtactaagccgtaccaagcttaataagatatgccagagaggcggaatttctcttcggagaggttccgcctctttttatgtataccccacgcccttactgcccaccctaaccacagggaaagggggcgcggggatgtccggcaaacgggtgctggcggtgtatgccgccttgctgctggggtttgcggtggtgctatgccggttgtatctgctggcgcagcaccctgcctatgctgcgcgggcggcagcgcagagcacggtcactctgcagttgcccgcccggcggggcaacttttacgatgcgcaggggcggctgctcactggtctcgaggagcgctggcaggtggtatgctttcccgggcagggcaattacgaccgcctgtatgcctgcaccgatgccgccgggcaggcgcttttgtaccgcagccgcagccgtgcggcaccctttttgctggaggtaagttgcgaccccgcccgccttgggctgaccggttatcccgccgctcggcggtatgcggcggtgccgctgtgtcagcatttactgggctatctggatagcacaggtcacggcgctgccgggctggaaaaggcgctggacgccgtactttccggcacaggggagcacagcagccttgtctgcgccgtgacggcgcagggtacgctgcgcaccggagaaacggctagacttttgcaagccgacagcggggcgctgggcgtgcagttgaccatctcccgcccggtgcagcgggcagtggaagcagtggcggcaagtaccatgacgagcggctgcattctggtgctggataccgccacagcggcggtgcgcgccagcgtcagtgtgccgtgctacgacccggagaaccttgccgacagcctgcaggcggagaacagtccctttctaaaccgggcactgcaaagctacgcggtgggctcagtgttcaagccggtgctggcggcggctgcgctggaagcgggcttgcagccggttttcgagtgcaccggtgcggtggtagtggatgggcagatcttccgctgcgcgggcggggtgccgcatggacaggtggaccttgccgccgcgctggaaaaaagctgcaacggctattttatccgtctgggacagcagctgggtgcggaaagcttgctggacgccgctaaagcctttggctttgggcagagcctgccgctggcagaggggcttgccgccgaggccgggcagctgcccgccccgcaggagctggcgcaaagcgggcagcttgccaatttcagctttgggcagggcagcctgctggcagcgcctatgcaggtggcggcactgttcaacaccattgcagcggacggcgtataccgcagcccttatgtgctgcaagccacgctggacgagaccaccggacaaccggtggagaccctcagccacccccgggggcggcgggtgatctcagcacagaacgcagcgcttttgcgcgctatgctggtacaggtggtgcagcagggcaccgcacaggatgccgccgggctttccggtggggcgggcggcaagaccggtaccgcccagaccgggcagttcaccccggagggcaccgagcgctgcaacctgtggtttgcggggttctggccggcagaaaagccccgctataccattgtggtattgcaggacggtgcggtgcacacggcgtactccggtgcagccatctttgcgcaggtctgcaacgcgctggaagcagcgggttaaatgcgcggattctacttgcaattttggctttgttatgctactatatagttgtatttttgcgtagttttccgtatttacaaataaaaggagcgttacgattcatgtctgttatcgaaattgttggcggtgccattctgctggtggcttcgctggtcatcgttttcctcaccctcatgcagcacacccacggtcagggcctgtccggtgccatcaacggcagtgtgggcggtgccaacaatgcacgtctgaccccggcagatcagatgctggctaaggtcacccgcattgcaggcgtggtgttctttgtggttgctattctggcttgcctgtttgcaggccgtctggcaggctgagaaggcgttgcagccccgtgaacggacggggctgtttttctgtgcagaaaaaagtgcgggcagccggttctgcgggctgccgcaaagaggggacaggggaaagtgcccgtcccaaggcagggctgtgctccgcaggagatgcacggccacggaagtgaaggagaaaatattttatggcaatgcgcgataaaattgagcacgcgatccagaatcagccgtgcaccgtaaaagatctgaaaaataagttcggcggggatcgcggcgcagaccgcaaggtgatggaggctgtggatcagctggtgcacgaggctgtcatctgccagcgccagggcgtgttcttcaccgtgcgcagcggccgtgccgacaaggcactgctgtgcaaggtggtaaagctgggcaagaactttgcctttgtcatgctggaggacggcaccagcgatatctttatccccggccggttcacccgcggcgcaatgcccggcgacaaggtgctggtggaaaagtttgcacatccccgggtagagggcagcgatgagggcgagatccttgctgttctggaagagaaaaattctctggtgggcaccatgcaccgcatggagggccgcctgaagtttgtgccggacgattgccccgccatctccatgcaggtcatgcgggactgcgaaggcagcgccaaggacggcgacaaggtggcagtggagatcctgctgcgcggcaaccgtcaggaggatcaccgtgtaggcgttgccatgcgctttggcagctgcgacgaggcaaagcgctgcgcaaaggcactgctctacgcgcaggatatccgcaaccgcttcccggacaaggtgcgggacgaggccaaaaagctggacaacgccgaggtgtctgctgcggactgcgagggccgcatggatctgcgcgccctgcccatctttaccatcgacagcgccgagaccaaggacatcgacgatgccatcagtctgaccaagactccggacggcggctttgagctgggcgtgcacattgcggatgtttccaactacgtcaagcccggctccgagctggacaacgaggcctttaaccgcgctaccagcgtctactacgccgatcaggtggtgcccatgctgcccaagcagctgtccaacggcatctgcagcctgaacgagggcgtgctgcggctggctttctcctgcctgatgcggctggataaggacggcaacctgaccgattatcgctttgtcaagtccgtcatccgcagccgggtcaagggcgtgtactccgaaatcaacgccctgctggccggcagcaccgatgacgagctgaccggtaagtaccacgaggtactggcgcagctgcccgccatgaaggagctgtacggtcaccgtgcccgtctgcgcaaggagcgcggctgcatggatatcgagagcggcgaggtgaagctgatcctggacgaggatggccactgcatcgacgtgaaaaagcgcacctccggcgagagcgaggccatgatcgaggagttcatgctgctggcaaaccagtgtgctgcccactttgcccgcgtaaagcagatcccctttgtgtaccgtgtgcacgaggagcccaacgccgaaaagctggagcgtctgcacggcctgctgcaggcctgcggtgtcaacgaccactttgccaaggatgtgcccacccccaaggagctgagcgccattctggaaggtgtgcgcggcactgcctacgagcagatcatcaatgttggtatgctgcgctgcatgtccaaggctgtgtacgaggaaaaacccaagggacactacggtctggtgctgcaggactatgcccacttcaccagccccatccgccgctacccggacttggctatccaccgcatcatgacggctcagctcaagggtaccgataaggacaccatgatcctgcgttacagcgagtttgccgaggacgtcagcaagcaggccagcgagcgcgaagtcatcgccatgcagatcgagcgcaaggccgaggactgctacaaggccgagtatgcccgccgccatctgggcgaatgctacgagggccgcatctccggcgtgacccagcgcggcctgttcatcgagttggaaaacggcgtggaaggctttgtacctgcttccagcctgaccgccaccggcaccatgcttaccgagggcgtgcgcctttctgatcccgtttccggcaagaactggaatctgggcgataccatgatgatcaccattgtgcgtgcggacgtcaatctgggcaagatcgactttgaggtcgccccggaaagcgcaaagcagtaaccttatcataaaacaaaaacagactgcccccgaagcagcgcgctagaccgtgctgtttcgggggcagtttattgtagttctcaaaatcctggcaaagtaaaatgcccgcctgaaaatcagacgggcgggtttgccatcatgtagtcgaaatacagtcccttgtgcagagcgtgggcaaagtgggaatcggtggtctcgccaagattatgtttacggataccattccggttgccgcgttttgagatatggcattctgctgtgattcttctcgggttcttcgtcagaacgcagaaaatgcggaaactgcttgatttaactcggtttccgtactagaatggaaactggaaaggcaaatacagtttccacaaggaggacgctcatgcaggaaaagctcgatgcgctggtgcgcacgcaggcgatgcagttgttccgtcagcaggggctgcatttcaccatgcagcaggtggcagagccgctgcacatcagcaaaaagaccatctacaccgtttacccctccaaggaggcgcttttactggatatggtagaccacgcctttgcagagatccaccgctgcaagcaggaaattctggcgggcggtggtactttgcaggaaaagctgcgggcggtcatcattgccatgccggcagaatatgccgcgctggatctgcgtcagatgaaggagctggacgaaaaatacccggtggtggcggcgcgggtgcgcagtcagttggaaaacgggtgggagcccactatggcgctgctggagcaggctgtggctgagggggtcatgcgtccggtatccatgccggtgctgcggcagatgatcaccgcatccatcgagagttttctggcagaccgcagtctggcagaaagcggggtgcagtatgtggctgtactggaggaaatgatctcgattttactggaaggagtgctgccgcgatgaaacacagcttttgtgaggattgggagttcacacgacactggacagaggcctttggcaaggggctgccggtgccaaaacaacaagccgtccgcttgccccatacctgccgggaggtgccgctgcactatgccacccccgctgattacgagatggtctgcggctaccggaagcggttccgagtgccgccggtgcaggctgcgccccgactgtttgtccgctttgacggcgctgcccatcaggcggtggtgcgggtcaacggcagggttgccgggcagcaccggggtggctataccggctttgcggtggagatcaccgaccttgtggaccgggagggtgaaaacctgctgaccgtgcagctggacacccgtgaagacccaacgattccaccctttggttttgtcattgattacctgacctacggcgggttgtaccgggaggtctggctggaagctacggcagaaagccgtctgactgatctgttcgtctacacgcccaccctgcaggaggctgtggtgcagtggacagcagagcttacgcccgcagccgcggcggtccgcatccggctggagaccgctgagggcactttgctggcagagcagactgcacctgcggcagaaaccgggaagatgcagctttctgtgccggaagcacagccgtgggatacagagcacccggtgctgcatcatgccgtggcagagcttttgaacgcagcggggcagcccatcgaccgcaaacaggtgacgtttggcttccgcaccgcagagttccgggcggatggtttctacctcaacggcaaaaagacctttctgcggggtctgaaccgacaccagagctacccttacatcggttacgccgcaccggaaagcctgcagcgggaggatgcccgcattttgcaggaggagctgcattgcaccgccgtgcgcaccagccactacccccaaagccagtattttctggacgagtgcgaccggcggggtctgctggtgttcactgaattgccgggctggcagcacatcggggacgacaactggaaggacgccgcctgcgagatgctgcaggagatgctcttgcagaaccgcaatcaccccagcatcatcctgtggggtgtgcgcatcaacgagagcgtggacgacgatgccttctatacccgcaccaacaaaatcgcccatcagctggaccccagccgtgctacctccggcgtgcgctatctggaaaaaagccatctgctggaggatgtctatgcctacaacgatttttctcacaacggcgtaacgcccggtgctaagcctaaaaaggacgtgacccccgatatgggcaaggcgctgctcatctcggagtgcaacggccacatgtaccccaccaagccctttgacgatggcccgcaccggcaggagcacgccttgcggcacgtccgggtgcagaacgccgcctatgccagtggggagcacgccgggtgcttcggctggtgcatgttcgattaccagacccacaaggacttcggctccggcgaccgcatctgctaccacggcgttctggacagcttccgcaacccgaagctggcggctgcggtctatgccagtcagggcgatactgacccggtgctggcggtcagctcctccatggacatcggagataaccccgccgggcagctgggcacggcctacgttttcagcaatgcccagcaggtcaagctctacaaaaacgatgtgtttgtcaccgccctgcgccgcagcgagtggacggcgctgccccacccgccctttgtgatggacgacaccatcggcgagctgctggaaacgcaggaacacttttctccctccaaggcagccgctgtgcgggactgcctgctggctgccgggaaatatggcttagcgggactgccgctggcctacaaggtcaaattcggctggtgtatgctgcgctataaaatggcctttaaggacggcgtggcgctttacggcaaatatgtgggcaactggggcggcgaagctacccgatggcggttcgatgccgtacaggacggcaacgtagtgcgcagcgtgaccctctgccccagtgcaaagctgcacttggaagtcaaagtcagccggacagttcttcgggaaaaagacacttacgatatggcggctgtgcgggtgcgcattctggatgagaacggcatcccagccccctacgcacagttcccggtgcagtttacggtagatggaaacgccgcccttgtgggcccgcagaccgccgtggcagaaggcggcatgaccggtacttatctgcgcaccgtgggcactgccggagaagccgtgttgaccgtttctgcaccgcagacccagcccgttgtgctgcggttcaccattgaaaaggaggatgctgtatggaactgaccctgaaacagaaaactgcgttcggcattggtgccgtgggcaaggatatggtgtatgccttgtcggcttcctacgtcatgtattattatcaggatgtgctgggactttcggcaagctttgtgggactggtgctcatggcagcccgattcttcgatgccttcaacgacccctttatgggggttctggtggcaaagacccgcacccgctggggacgtttccgtccgtggatcttttccggcacgctgctcaatgcgctggtactctacgccctgtttgccgccccggtgctagacgaagcggcattgatggtctacttcagcgtggtgtacatcctgtggggtgtcacctacaccatgatggatattccttactggtccatgatccccgccgtgacccgcacgcccaaagaccgggagaatctttccatggtgggacgtacctgtgcaggcgttggttcggcactcattgccatgttcaccatgctgctggtgggagcccttggcggcgacagcgagcgcgctggcttccgctgggtggcgctgatcgtagcggtaatttttgcagtgacagagctggtgtgctgcatttccatgaaagaaaccacccccagtgagatgaagaccgccaccgtgaaggagatgttctccgccctgttccgcaacgatcaggctatggtggtggtaggcagcattgtgctgatcaactcggcgctgtaccttacctccaacttcatcatctatttcttcaaatacgaccttggcggtgcgggctggaaagccacctacaccctgttttccaccgtgggcggtgcggcacagatccttggcatgatggtgctttaccccttgctgcgcaaaaaattcagcagtacgcaggtatttcacctgagccttgtgctggcactgtgcggctacggcacgctgctggtgttctgcctgaccggcctttcccacagtctggcgctgctgtgcatcccgggcgttgtcgtgttcgcttgcaacgggatgctgaccgtgctgaccaccctgttcctttccaacagcgtggattacggccagctcaagaccggacgccgggaggagagcgtcatcttttccatgcagacctttgtggtcaaggcagcctccggcgtagcggtgttcctgaccggcatcgggctggacctcattggccttgtgggcaacacggaggagaccggccccgtggcagtacaaagcgccggcaccctgctgggtctgcgcctgatgatgacggtcttgcccatgctggtgctggcaggtgtgctggtgctgttccgccgcaagttcattctgaccgatgcccgcgctgccgagatcagcgcacagctccacggggaggaaacgcaccatgactgaaacgctgcactggtacgctgagaccaccggcggtgtacggcagggcgatgctccggtgcacccgggctgtggcgcggtgcatctttccgctgacctgcctgccgggacgctgaaagccgtgcgtgccgagctgccgtggaagatggaagcagacgagcgcctgttcatgaacggctaccagacatggacatacagcccggagctaaaccggaacggcaagctgcgcggcaccgaccacatccctggctttctgcgcaagaaatacgcctttgaccgctacggcgattatcattttgtgacatacgggcatcataacggccaaagccacggcttttcctactgctatttccgcaagggcgggcggttccagctggtggcatcgctggacgaaaccccgggctacaccatcctccggtacgacagccgcaaagccctgctgacgctggagcgggactgcgccggggtggagcatcccggcggcagctttgctctgttcgacctgttttttgccgagggcggcgagaccgaagtgtttgacggttggtttcgggctatgggcatccgtcctcgaaccgaaaagaagctggcgggctattccagctggtacaaccgctatcaggacatcaccgaggacaccatccgggaggacctgaccggatgccgcagcctgctttgcccgggagacctgtttcagatcgacgacggctgggagccgaaggtgggtgactggctggaaacggatgcacagaaattcccccatgggctgaaaggcatggtgcaggagatccacgcctctggctttcaggccgggctatggcttgcaccctttgtgtgcgaaaaggactctgcccttttccttcagcacccggactggctgctgaaagtggacggtgcgccgtggtgctgcggcagcaactggagcggcttttatgcactggacatcgacaacccggcggtgctggactatctgcgccgggtgttcgaccgggtgctgaacgattggggtttcgaccttgtcaagctggattttctgtatggcgctgccccctttggcaacgcccacgagagccgtgccgcccggatgcgccgtgccatggagctgctgcgcagttggtgcggacaaaaagccattctcggctgcggagtgccggtgatgcctgccttcgggctggtggattactgccgtgtcagctgtgacgtagggctggactgggacgatgtgtggtatatgcgcctgttccaccgggagcgggtgtccacaaagcaggccatcaacaacacgctattccggcggcagctcaatggccgcgcctacggcagcgacccggatgtgttcttcctccgggaagaaaactgcaagctgacggcagagcaaaaacgcactcttgccacagtcaacgccctgctgggcaatgtgttcctcacctcggatatgccttcccactatacggatgcacagcgggacgagtaccgccgcctgcgcaggttgtttgaacatgcaaaacaggtagaagtagagacagaaaatggtgcgattacgatccggtattctctggatgagaaatgtcaagagctgcggtgcagtgctatttatagagaataatgagggcgtaaaatcagcttcactctttttcgttggccggaggattctttatgtgaaacgtaacgaacgtcttcctcagaaaagtggctcacgccgaaagctgtataagcagataaaataaaaacgccgccagtgtaccgtgtgatgggtttcacatgctacactggcggcgtttttgcgctatgaggggcgtaacatccaaattctacactgaatccgccctcgacctgtttccaaggacgagaacggttcagactgtaaaatgatgtccaaacaatattgaacgaatcaccgcacgatattactgggcttttgacatcgagagtacgcactcgcaatgcttcgtcctcgggaacagatccaccggctgcaccttttctgcgtgatacccattctgctccagccatgcggcgtctcgtgcggcggtggcggggttgcagctgacatacaccacccggcggggcgccatgcgcaccactgcggagagggtggcctcatcgcagcccttgcggggcgggtccagcattacgatgtccgggtgcagaccctcggcagccagctgggtggcagcctgtccggcatcggcacagaaaaagcggctcttggcagccacggcttcgcccatgcgggcagcgttggccttggcgctctcgatggcctccggcacgatctctacgccgatcagctcccggcattgacctgccatggaaagaccaatggtgcccatgccgcagtagagatccagcagcgtgtcgtccggggtcagctgcgcgtactgcgcagcaacgccgtacagccgctcggcggcaagcgtgttgacctgatagaaggacagtggtcccaaccgcaccggcacgccgcaaagcgtgtcctcaatgtagcccgggccgtacaggatgtgattttcactgcccaaaatgacgttggtgtttttggcgttgacgttgagcagaatggtgctgatggccgggaactgcccccgcagcgcggtgcaaagctgctctgcgtggggcagctttgcccgggtgcataccagacacaccatgatctgcccgctgtgcgcgccgcgccgcaggaagatatgtcgcaccagccccttgccgctctgctcgtcgtaggggcggatgccctgctgtgcaaaaaaggcgcacagcgtgttgccaatctcgttcagcacgctgggctgcagcttgcagtccgggcaggggacgatgcggtgggtgcgcccggcgtagaagccgatgcagggcacgccattcttgtctacgcccacagggaactgcaccttgttgcggtagcggtctacgtctggagaaggcagaatatccagcaccggcacctccagcccgccaatgcggcggaaggcgtccagtacgctttcctgcttggcgcgcagctcagcggcataatccagatgccgcaggctgcacccgccgcaggggccggccaccgggcagtccaccgggacacggtccggcgagggggtgagcagctcgtccaaaatgccaaaggcgtaccggccgcagtccttcacgatgcgcacccgtgcttcgtccccgggggcggtgccggggacaaatacggcctcgccatcggcactgtgggccacaccgctgccgtcgctggaaaggcgctcgatgcgcagggtcaggatctggtttttctgtaaaggcatggtttctccttgtgtgatgggctcaggttacagttgggcagggcttgccgggtcggcgtcctgctgggcggcaaaatacttgctgggcggcacgcccttggcgcgcttgaacacccgtgagaagtagaactggtcaaagaagcctaccgacaccgcaacctccgcaatggaaaggttgccggcgcgcagcagcttgcaggcctcgttgatgcggtactcggtcaggtagtcgatggggctcttgcccacgttcaacatgaacacccggtacagatggctgcgggaaacccccacgctcttggctacatcgtcaatggagatgtcgtgggagtagttgaactggatgtacttgatggcgttcagcacatactggctggaggaggaggccgtgtggggcttgcctgcgctggtctcccgcatcaaggcagcgataaacaggtacagataccccaccatggctgcctcgtcctgtggctgcagcccgcgggaggaataaatgttggtcagcgctgcccgcatcccgtccgggtcgctggtgtggtgcacgggggcatcgtccgtaaagggcagctgcgcggccagcttgtgggcacaggcaccgttaaagcccacccagctgtactcccacggctgctgctcgtcggcggtgtagcggatcagctggctggggcgggcaaagaacaggtcgccctcgcttacctcccaagtgcggccgcccacctcgaagatgcccttgccggataccaccagatggatcaggtagtggtcacggatgccgggtccccatgtctggcccggagcgcaccgctccaagccgcagttgaagatggacaattcgatgttgttggtgtaattctgcttaaaggattgcttataaacgtctggcatggcagctttacctccgtcctgtcacattctgcacccagtataccatagaatgccctgcaaattcaacaaaagtacatcttattctttgcacctgacgccaaattttggatttttaggtcaaataaattgaaaaaacgcccgaaatgctttacaataggcaaaaagagcagaatcgtttattccggaggggaggagctgtcatggccaccagtgcacaactcagaaaacagatcctgcagggcagctgggacgccgtacttgctgcactttatggggcgaatccggcggtgctacaacggcagcgcgggcgctatgcggctgcgctggagcagttcgagctgtatttcggccctgggcggcaggtgcaggtgtactctgcacccgggcgcgcagagctgggcggcaaccacacggatcatcaggggggctacggccttgcggcggcggtcacgctggatatggtggcagtggcggcccgcaatacggatggctatgtgcgggtcaagtcccgggggttcaacaagctggatgtcattgatctggccaccgcagagccgcaggcaggggagagcacccattcggccagcctgatccgcggcattgctgagggtttccgcgcggtgggcaagcagatcggaggctttgatgcctacaccgccagcgatgtgctgcggggctccggtctgtccagctcggcggcctttgagatgggcatggcctctatctggaacgaggaatacagcaccgggctgaccctggcagagctggcgggcatctgccagtatgcggaaaacacctatttcggcaagcccagcggtcttttggatcagctgaccagtgcggtgggcggcattatctttgcggattttgccgatccgcgcaccccaaagatcgaaaagctccatgcagacggtctgctgccggaaggaatgttcctctgcgtcaccgatacccggggcagccacagcgaactgacgagcgagtttgcggcgattcggcaggagatggagcaggtggccgcctgcttcggaaagccgctgctgggtcaggtggaagagaacgcgttctggatggcactgcctgtcctgcgcagctgctgcggagaccgtgcagtgctgcgggcgatccattattttgaggagaatgcccgcacgctggcgcagcgggatgcgctttatgcaaagcagttcccggtgtttgcaggtctggtgaagcagagcggacaggcttcctttgcgctgtgtcagaatgtgtactgcacagcggatgtgcggcatcagggactgtccatagcgctggctctgagccagagcattctgcagggcagtgagggcgcatggcggatgcagggcggcggctttgcaggcaccattcaggcttatgtgcccgggcagctgctggagcggtaccatacagccatcgagcaggtattcgggcagggcagctgctatgtgctgcgcctgcgggagcagggtgcagtccgggtgatctgaacaaaacaaaaagccgtgcatagccggaatgctccgggatgcacggctttcttatagcttattactgaagagaaaaaagctgggggagagaattttcgaccggctggtcatttcgctgctgcgtattatccaagtactggacggcagtgacggtagcctcgcgggtgatgccaagcaggcggccgatctgctgagagagcttgatcccggtctgcacacctgtcttgatcacgcggaaaagtagcatgggcacaaaggtgaaggaaaacgagatcagcccaccgttccagaagaaatcattgaagtgcagattgtcaaaaaagctgccgacagcatcgccgaattcgctgccgccaaaggcagcgcactgctcctcgggggagagggctgcgtaggaagagggcagctgaagctttttcataaataaaaacactcctttccgggtcgatgaaagatcagcacagagctaccagagtaggcagacaattctgctgctcggcggcctcctgttctgccttctttttggcctgaatttcgttgtacgtattcttaaaggcgtccacaagatttttgatggagagatagatgctgcgtgcctgacaataggcataataaccgcccagaccagccataccgatcgtggcaaccttgctccatgtgttcagcttgccccagtagtgcccaattgcatcaccaacacccaaaccatcgttcagggcattctgcataccggaaactgcagcctggaacgcatagcggcccatcatgcccagcaggtttaccgtggcattgatgccaaaggccatcacctgctccggagtgatgttgatagaaagggcaccgccctcggtataggtcatctcctcggcagagagcacagagcagcaggcgggcagctgcagcgggcgctgatatgtatgatccatgatggaaaactcctttcgcacacagaactccccaaggggcagttcatctagtaactgaattgtagcatatctgcacaaaaatgacaagagagcgcgggtttgaaaatcatgatacatttgtgaatatattgtgacgatgcgttgtaaaactgacctgaatacgccataaacgcgcaaaactcctgcttttttacggcgaaaaaatgttgtagcaaaaatgtgctgaaaaagccgatcaacaacaaaggcatctgcccgtacccgctgcgcagaacgcagcagcgggcaaagcagatgccttgtgtgttttacaggttgccaaacgaaaggaaaacgaggtcaaagtgctttcggcacgcgctcatacagcgtggtcagcgcggcgatgtgcccggccaatgcagcgggcaggggctgtgccagccgccagcgccagtttgcgccctgtgtgctgggggtgttgatgcgggcctcgctgcccagatgcagccagtctgccagcgggatgatggcggtgtccgaaacactggcaaggcatgcgcagatcatgccttcagtcagggtctccggtgtgcagcgcagataccggcaggcgtaggctacgtcctcggcgctggcgttgctgcgccaaccctcggtggtcacgttatcgtgggtgcctgtatacaccacactgttgcggggataggtgtggggcaggtagttgcccgactcccggctgtcgaaggcaaactgcatgatcttcatgcccgggtagccgctttcggccagcatcgccttcacctccggggtcaagtagcccagatcctcggcgatgatattgccgccgcccagcgcctgctgcatggcgtggataaagtcccggtcggggcctttttcccagtgaccgcctgcagccgttgtgttttcggcagggatagagtagtaactctcgaaaccgcggaagtggtcaatgcgcaccacatcgtagatagaggtggcgtgcttcatgcgccgcttccaccagccaaagccggtggccttgtgggtaggccaatcgtacagcgggttgccccacagctgtccgtctgccgcaaaggaatccggcgggcagccggctacatgggtcaggtgcatctgtccatcagtctggaacagctccggttgggtccacaggtcactggaatccgggctgacgtagatggggatatcgcccaccagcaggacacctttgcggttggcataggccttcagcgcgttccactgggtgtagaagaagaactgcaccgccttgtggtagctgatctggtctgccaaccgtacctttgcggcggcaatgacctccggctcccggcagcgcagggcgtccggccagtcggcaaggcctgcctgcccctgctctgcctttacggccatgaacagggcgtagtcctccagccagaagctctgcgcggtgcagaaggcctcgtaagcaggggagggggctgccagcagccggtcagcagcctttttcagcagcaccgggcgctggttatacagcgcaccgtagtcaacggtgcttaccggctgcgcggcgggaatctcttcggcagtcagatagccatctgccgccagcagccgaaaatcgataaagtaggggtttccggcaaaggcggaaaagctctggtaggggctgtcgccatagccggtagggccgatgggcaggatctgccaataagtctgctttgcctcggccagaaaatcaacgaatgcggtcgcttcactgcccagcgtaccgatgccaaaaggccccggcaggctgaacaccggcatcagaatgccgcttgcacgcataacgtgcacctccttagccctttacagcaccggccacgacaccctcgatgatgtacttctggcaggtcatgtagaggataataatggggatgatagcaatgatgatgcaggccatcatgggagccagctccacacggccgtagccgccgcggaaatactggatcgccatggggatggtgcggtacttcttgatatccagcaccagcgtgggcagcagatagtcgttccacacccacatggtctccagaatagcggtggagatcatggtaggcttcaggatggggaacacgaccttgaagaagatctggatggggttgcaaccgtcgatcatggctgcttcctcgatctccatgggcacgctcttcataaagccggtaaacatgaacacggccagaccggcgccgaagcccagatagatgatgcagatgttccaagggttgttcaggttcagacggtcagcggtcttggacagggtgaacatgaccatctggaagggaacgaccatggagaacacgatcagcagattcatgaacttgctcagcttgttgttcacgcgggtcaggtaccaaccagtcatggagcagcacagcaggatcagcaccacgctggtgatggtgatcagaaggctgtagcccatgctggagagaaagtccatcttggtcacgccgtaaacgtagttgcgcagtccggcaaaggtttcggcggtgggcagacggaacaccgtagaggtggtaaagctgccctcggttttcaagctgttcagcaggatcagcacgatggggtagatccacagcaggcagagaagcaccattacaacaacaaggatgacatcccaggttcttttctgtttcgacattactgctgcacctccttagagcgggtaaagtggagctggatcagcgagatgaccaccacgatcaggaagaacacaacagcctttgcctgaccaatgcccttccactgcgcaccggagcggccgtagaaggtgttgtagatgttcagtgccagcatttcactggcgttggcgggttcgcctgcggtcaaagccacgttctggtcgaacagcttgaagctgttggtcagggtcaggaaggtgcagatggtcacgctgggcatgaccatgggaatcttgatcttgaacagaatctcgcggtcgttggcaccatcgattttagcggcctcgatcaggtcgccgggcacgctttgcaggccggccacatagatgatcatcatgtagccgatctgctgccagcacatcaggatgaccagaccgacaaaaccggccttggcatccagtgccagcaggggcttctgcaggttcgccagcacaccgttgagcaggatctgccagatgtagcccagcaggatgccgccgatcaggttgggcatgaagaacacggtacggaagatgttggtgcccttgatgccgcgggtcagcaccagcgcaattgcaaaggcgcacacattgatgagcacagtgctcaccacggtaaagaccgccgtaaagccaaaggcgtgcaggaaggtggaatcctgaaataccgagaggtagttctggatgcctacaaaggtggtcttggaaacggtagtgaaccgctggaaggacagataaacgccccagataaagggccagatgaagccgataataaaggcgaccagagtaggcagcacaaatatcggccagtatttactaatggctttttgcatgatatacctcctgagggagctgtctgataaaaaaggaaaggaggcgggcgaacttttcgcccgcctccctttttaattcctagggagatctccagtcaaaggcttagccgttggccagcttgtactccttggcccagccatccacaaatgcggtgacaacgtcgtcccacttgccggtacctgctgcgtatgcagtcagagcgctgcccacgccgttcttccactcctcggaaggcatggtggagaagcaccagtcaacactggtcttgccgtcggccacatactggtttgcaatggtgatcagggggttggtggagtccttagccttcttgaaggggatgacgaagcccatcttgtcagccattgcgctggtgccggtctcagaggtgacacaccagtacaggaagtccagagtagcctgaatgtcggcctcggaagcggtgttgttgacacaccagaagttctcggaaccggtgcacaggccctgattctcctcgccgtccacgccgatgtagatgggcagcatacccagattgtcatcgcccagatccttcacgtcattgtaagcccaggtgccgttctggtagaacacggccttcttgcccacaaactcagcaacagcatcattgccggtcttggaagccagcagcttggggtcgcaggtggaatcggtgatgtacagatcccagatctgcttgtagttgtccagataggtgcccttgatggcgtcggtggagccgatgccgtctgccttgtactcgtagtagatgggcaggtttgccagatgggtcttgaagcgccagtcagaagaaccgtccatgccagcggaggtgaaagcaccgtccacgcccagctcagccttacgagcctgaatgtcatcagcgaccttcttcaggtcggcaaagcccttgatgtcctcctgcttgtaaccggcagcggtcagcagttccttgttgtagatgatgccgtaggtctcaatgacgtatgcaatgctggtaacagcatcgccgtccttcagtgcaaaggaatcgctggtcagctcgccgtacagctggctgccggacaggtcgtagcagtaatccttccagtttgccagaccaacagggccgttcacctggaacagggtgggagcctcgctcttctccatctcgctcatcagggtggtctcgtactggccggaagcggcggtgacaacggtcacaggcacgccggtctccttggtgtactcagcggccagatcctgccaatcctgatcctgctcgggcttgaagttcaggtaatagaccttgccgtctgcctttgcagcggtgctggaagcagcggtagaactggcagcagaggaagcggtgctgctggaggagccgccgcaggcagccagacccagagcagcggcagaaacgccagcggccttcaggaagttacgacgagtgatcatctttttcataataagttctccttcttattaaaattacagatcaactatatactctccgtccttcgacggagggaatacaaaatttaaattgcccttacgctttcgccctgctgcaactccggctgcagggtcacggtctgggcagaggagccatgctcgatctgccgcaccaacagttcgatgctttgcagtgcgatctgctcgctgggctggacgatggtggtcatcaccggtacgcagtagcgggacatcgtgatgccgtcaaagccaatcaccgaaacatcctccggtacccgcagcccggcgcttaccagcgcccggatggcgccaaaggcgatgacatcgctcatggcgaacagggcggtgaactctgcccgtcgggccagcagactgttcatggcgtggtaggcggattcgaaatcgtagttggataggccgtacagcttgtcgttgaacacaatgcccgcatcctccatggcctgctgtgcgccctgacggcgcatcagactggggtagctggtcaccggaccgcccaaaacggcgatcttgcggtgcccctgccggatcaggtagtccacagcggtataggccgctgcccggtcatctacgcccaccatggaaaggttggggaagtccaactcgtccgtgaccagcgtggtgagcaccgagggaacattgatacggtcgaagccccgctggaagttggctacgctgccgcccaagaagatgatgcctttgggcttgatctcccgcaggatcttttcggcggcgtcgatctcgttggcgttctcgtccaagtaagagacgatgccgttgtacccgtacagggtggcggcgcgctggagctgcaccagaaaatcagaaaaaaagatgttccgggtgccctttaccacaaacacaaggctgcgggactgctggatcttcagctgtcgggcgttggtgttgggcacgaacccggcctcccgcatcaccttcagaacgtgctccttggtctccgggcggacatccggcctgtcgttgatcacacgggagatggtgctgacagagcaaccgctgatccgtgcgatgtccttgatggtcaggtttgccatgtcggcgggcctcactttctgaaagtgtttcgggaacgttgtcgggaacgttcccagcgacattagtatggcacattctgtataaaaaatcaataaggttaattcaactttgtacaagatgtgcaatgaactgccctgtgtttgtgcagtttgatttgcgcgcaaagcagcaaatctgaaaataccgataattcccggtacaagtcaaaaacgaccggaaattatcgtaccggtttgtaactttttgcgcgaaaaacgcttcccggtacacagctgaatgtgctatactatgtgaaaaaaggagagggggcaaaatgttatgatcttatccttacagggttgcatggcagtgggaaagaccacggcagcccgctatctggaacagcactgccaacaggtacaggtttgttttgaggacaacgctgccgtccttgcagagataaagcagcgtgggttgaataagaacagctatgcggactatctggagatccaacggcttttttgcgcaatgagctgcgccgcgggcagaaagcaaaaaaatacccccacgccgtgatggatttcggcgcggaggagattgagttctacaccttgaactaccccaagagcagggggctggagtgggagatggaagcgatccggcaggctttagccccggagcttgcagcggtgcaggcttgtatgccggagcacattctgtttctggacgcttccgaagccgtcctgcgtgcccgtaaagcgggagatgccacccgttcccgggaattctttgcgtattacctgaaccatcttctgtcgctgaaacgggaatggttccgggaaaagaaaaacgtaacatttctttctaccgacgggctgaccgctcggcaggtgggggagaaggtaaaacattggtgtgaacagtatatctaacgcaagcaaaaaagcgctctcaccttgtcatcggtgagagcgctctgctgattgctgattattttgatcgggttggttctttaaagattagtcgctgacgtagggcatcagagcaacgtgacgagcacgcttgatggcgatggtcagtgcgcgctgatggtaagcgcaggtgccggtcacacggcggggaatgatcttagcacgctcagagacgtacttacgcagacggggcacgtccttgtaatcgatggtgtcgatgcgatcgacacagaagctgcaaaccttcttgcggccgcgacgcatggggcgtgcggggcgagagccttcggttctttcaaaagccattgcttattacctcctattggatttttaacggatggaccgtttcgtgtcagaacggcaggtcatcgctgtcatcaatgacggcgaagtcgtcggcattgccggcagagtagctgggagctgcctccacagcagccggacgggcaggcgctgcgttctggtaggacggagcggcattctgatagccgtttccgtcacctgcattgctgctcttggggcctgcaaagttgatgttgttggcaaccacttcaacggcagtgcggtttgcgccggtcttatcctgatactgacgggactgcaaacggccgtccacaacgatcagggaacctttttggaaatagcggcagacgaattcggcctgccgatcccatgcaactacatcgatccagtccgccacgctctgcccattggcatcgcggcgcccgcggtcgcaggcaatgcggaacgaagcaacgttcttgccggtagtggtctgacgcatttcagggtcacgcgcaaggcgacccatgatagcaacaacattcaacatagtacggtttccctttctgtcacagaagaattactcctcgtgagcaatgatcaggctgcgcataacgccttcagtgatcttgtacacacggtccagctcagcggggaagctgggctcgctggtgaagttgatcacggtgtagacgccctcttcctcgtcgttgatggggtaggccagacggcgcttgccccactcgtcgatagaatcgatcgtaccgttagcctcgatcagggacttgaacttacccaccagagcggcggaagcctcctcatcgagagcggcgctggtaatcagcatggtttcgtactttgccatttttgtagcacctccttttggacttgagggccctgcggatctgcaaggccaagggtacacaggctgcggtatcgcggcctgtgtggtgtgtctgttcagacagcaatttattatagcaagcttctttacttctgtcaagcttttttgacaaaaagaacgataaaaaatgttttgcattttttggtaaaaaggactataatgtaaacgctttccctgcaatatggcagggccggggctccggcagtggcagggaagcgggaaaaattaaaggaggataatccatgtattcgttgtttcgagatctggcaatcataatcctgagcgcgaaattcttcggactggtggcgcgtaagtgcaaggctccgcaggtggtgggtgagatcatcgccggcctgcttatcggtccctgcgtgctgaacctggtgcagatcagcgactccatctccatctttgcagagatcggcgttgtgatgctcatgttcaccaccggcctcggcaccaacctgaaagagctgatcaaggcaggccccatcgccaccctgatcgctaccgttggcgtggctgtgcctctggtgggcggcaccttattatatggtgcgttctacggctttgccgcagttggcagcccggagttctaccgggcgctgttcatcggcaccattatgaccgctaccagtgtgtccatcacggtggcgaccttgcaggagcttgggcacctgaagagttttttgggcacgactatcgtcagtgccgctgtcattgatgatgtcatcggcatcgtggtgctcacctgtgtgctgggcgccagcagcggcaccggtacgggtctgggcaaggtgctgttcaacactctgctgttctttgccaccgcactgggcgttggccttgtggtacactacgccatgaaatggctggatcagcgcaacccccatacccagcgtatcaccatcgtgagcatggccttctgctttgccatggcctacatcgcagaggaatacttcggcatcgccgatatcaccggcgcttacattgcaggtatcgtgctgtgcaccatggatgacgcaccctatgtagagcgccgggtggatatcagcaactacgttatctttgcgccgatcttctttgcctccatcggcctcaagaccgatatcagcggcctgaccccggagattttactcttctgcgtctgcttcgtggttgtggcactgatcaccaagatcatcggctgcggtctggcagcaaagatctgccgcttcaactgggacgattccctgaaggtcggcgtcggtatgatgacccgcggcgaggtggcactgatcgtggcacagaagggcttggccatcggtgtggtagacccggtctactttaccgctgtgatcctgctgatcgtggtgtccagcgtggctaccccgctggcactcaaggccatgttcaccaagcgtccgcctgtgccgcatcccagtcaggcaaactaaatcaggaatttgattttcatgtttagggttcagaatcgcctgcgggcgtttctgaacccttttttcatctgaaaaaatatatgcaaaaacggggctgctgcacatggtttcgtgcaacaaccccgtttttattgtttacgcagtatataatttacagcgtcttgcagaactccttcaggtaggcgcggaactcctcgccgatctcaggatgctgtagtgccagctccacctgcgcctccacgaccttgagcttattgcccatgtcgtagtgcttgccggtgaactccacggcggtcatgccgccgcgggtgcgggcatactctgccatggcatcggtcagctggatctcgccaccggcaccgggcttggtgtgggcaaggatctcgtagatctccggggtcagcagcacgcggcccagaatggaatagttgctgaactcctgccccttcttgggcttctcgatcatatcgtccacaaagaagtagttgtcgtggatgggagtggtctttaagctgcaatagcggctcacgtcctcccaaggcacagcggacacgccggcaaccgggcggccgaactcctcgtaggcgcggatcagctgggcgcagaccggatcctcgccccagatcacgtcatcgccgtaaatgaccacaaagggatcatcgccggtaaaggccttggcggtgttgaccgcgtgccccagacccagcgtctccttctggcgtacaaacaggatgttggccatattggcgatgcccagacactcctccagcatcttttccttgccgggctttgccagcttttcctccagctcagggctgcggtcaaaatgatcctcaataatgctctggttgcggcccagaatgatcaggatatcggtaataccggagcggacggcctcctccaccagatactggatggcgggcttatccacgatgggcagcattcccttgggcattgccttggtagcgggcagtacgcgggtgccaagacccgcagccggaataacggctttggtgacttttttcataatgattctcccatgttctcattttatgcacggtgaaccgcgcttttcagcaggatccccatcctgcatgaaccgttatcagataaaggtgcctaccagtgcgttcaggtccggccccagcagcatggagcaaaggctgcctactagcatcagcaggatgaacgctccgatgcaggctgcaaagctgacaccgccctgtgcgttcagcacggcgcggcgctgctccgggtccgggaactcggcacggatgcggcggatgcgtgccgctgcgctgcggcggtagagccacttgccatacagcccccgcaccagcatcagtgcaaaactgagaagggacatgacgcggctcaacactaccagcatagaggcgctgatcccggcggtcagggggctgccggtggtctgcatcatactgattaaggtggggatgaacagcagcagttctgcggccagaaagccgaaggcgggcttccacgccttgcggtagaaaaagtagaacgggccgaacagcagcgctgaaaaactcatggagatcttggagtgacgcagctgcatctggctgtaatcgttcaggtagaccggcgcggctgtgccgataaaatccacccagtcctgataggggacgccgtcgatcagttcatccttgccaaaggcggcgcgcacattgcggtgcaccgggtcaacgaccttctcggtaaaattacggtacatttcgtcctggtacatcctgctgtaatcaaaatcccggttctgctcggcgctggcggcagcacggtcgttgggctgttctgcgctctcagggggcagggcagcgccgcagcagcggcagacattctcgctgcgcagggtgcgctccccgcaggtgggacaggtgcgcagctgcgcatcctgataaggaaacttccattcatagcctgcgccatgggcaggggcgtggatgcacagacccatcttctcgtaacaggtgcggtgatagggtgcaccgcagtccgggcagaccacgatgtcgtcctgaagggtcagcggcttgccgcagccctcacagggacagccataatatttcggcatgatatcctcctgtgaaatcgatcatactggtattatactcccccgggtatgaaaagaaaaggtgaaaatctttaaaaatccggcaagatagtatttttcctctttactttatcacagattctcggtatactaatgaagtatctgtgtataaactgtgtcttttggcggagcagaaaatgcgcgctgcgcgtgcgttttgcaccctgccggggacattattgttatgatgtaaacccttgaacgagaggaacttagagaatgatcacgactgatgaactgaaagtgcagttggccgagcacgccaaggccgttaaggacctggaggaagcactggccattgaagcaagccgcaagcgcgtgcaggagctggagcacaccatgtcccgccccggattttatgatgatgcagaactgagcaagaaggtctttgacgaggtcggcgacctgaagggcaagctgaaccgctttgaaaagctgcagggtctgtacgatgacgctgagaccatgctggagatgctggacgaggagtacgaccccgccatgatccccgaggccgaggaggccgtgaacaccgtgggcaaggctgtggaggaactgcagctgatgaccatgctgaacggcgagtacgaccacagcaacgccatccttaccttccacgcaggcaccggcggcaccgaggcacaggactgggccgagatgctgtatcgtatgtataataagtgggcacaggcacatggcatgaccgtggaggtgctggattatcaggacggcgacgaggccggtctgaagagcgcttccatgatggtcaagggggccaacgcttacggtctgctcaagagcgagaacggcgtgcaccgtctggtgcgtgtctctccctttgacgccaacgcccgccgccagaccagctttgcctctctggaggtcatgcccgagctggacaacaccattcaggtaaacatccgccccgaggatatcgagatgcaggtgtaccgctcctccggcgccggcggccagcacatcaataagacctcttccgctgtccgtctgatccacaagcccaccggcatcgtggtcaactgccagacccagcgcagccagttccagaaccgcgactacgctatggaaatgctgaaggctaagctctaccagatcgccaagcagcagcacatggataagatcgacgacatcaagggcgtacagaacgagatcgcatggggtcaccagatccgcagctatgtgttcatgccctacaccatggtcaaagatcaccgcaccaactacgagaccggcaacgtcgatgccgtgatggatggcgatatcgatgagttcatcttcgcctacctcaaggccgccagccgcggcgagctgcaggacgcataagcgcctgcccctgtaaaatcataaccgcacctgtgtctatttttggatgcgggtgcggttttttcgtgcttgtctgcgcatactaaccccgaaaaatgcgcagggaggccgtaaaatgtccaagcacagcatcgtccggtgggggaagatcatgggtgcctatctgctggtggccgcggtggcggcgctgggctggctgtggtgcgtcctgccggagcaggtctatctggagccggagcagccccttgcgctgccccgctttggctgggtggaaccgctgcgcggacacggcagccgcaacgtggccagcacccgggcagcgggcagctatcagaccacgctggcgctgggcggctggctgccggtcaagaccatccgtgccaccgtgatgcagcgccccacggtcacggtatgcggcacgccctttggggtgaaaatgttttcagagggagcgcttgtggtgggcttttccgaggtgcacaccgccgccggtacaataaaccccgcaaagcaggcggggctgcggctgggtgaccgggtcatccgcatgggaaacacggtcaccgagaccaacgagcaggtccatgccgcgctggaagccgccgccggtgcggcggtggaggtggtctacgtccgcaagggggagcagcggcagaccactcttttgccggtgtgggatacgcagaacgcccagtggcgggcaggaatgtgggtgcgggattcctccgccggggtgggcactctgacctttgtggatgcgcaggccggggtattcgccgggctgggtcatcccatcagcgacagcgacaccggcgagcaggtcgccctgcgcagcggcgagatcgtggcctgtcagatcgtgggctgcaccggcggtaccgccggcagccccggagagctgaaaggcaaattcctcagcgaccacgcccttggcagaatttgtatcaacggcgaaaacggcgtctacggcacggtaagcaccgccattgccgggcagcagacagagcttgcctttgcgcaggaggtgctgcccggcgcggcagagatcctgaccactaccagcggcgaaacgccccgcagctaccgtgtctatattgaaaaggtgaacgacgccgacccgcgccgcaacatggtgctgcgcgtcaccgacccggcactgctggcgcagaccggcggcatcgtgcagggaatgagcggcagtcccatcctgcaaaacgggcggctggtgggtgcggtgacccatgtgctggtcaacgacccgacacgaggctacggtatttttgcacaaaccatgctggaacaggcacattccgtgcccggaacggacgcagcagcataaaaaagtatgacattcgagcagaatttccataatttcccaaaataaaccgttgaactatctggaaaattatggtaaaatccatggtgttaagggaactgcacacattggaggaaacaaccatggataaagtgagattcttgatgtcggataccggtgctcagattacagaagcctgtcgtgaggcgctggagcaaaagggcgtggaagtgaccgttgtggaaaaggatggaaacaaggttttacagaagatgttggccgttcgcccgcaggtagtgctgctggacgcctttatgcccgggctggacgcgctggcggtcaagcagcgctacaacgccgcaggcgagcgccacacctcatttttcgtcaccggcgcgttccagagtgaggagatggtacaggagctgctggacgaaggctttgcctactatttcgtcaagccctttgacgaaagtgtccttgccgcccgggtgctcaaagcagccagcggacaagaaaaacacctgctccacaccagtgtggacagtgacgaactgaccgtcaccgaaatattgcaccaaattggcgtgcctgcgcacatcaagggctaccagttcctgcgggatgccatcctgctcaccatgaacgagccggagtacatcaacgccgtgaccaagcgcctgtacccggagatcgccaagaaaaacggtaccaccgccagccgggtggaacgcgccatccgccacgccatcgaggtggcatgggataggggagatgtggataccctcaatagctacttcggctataccatccataacctgcggggtaagcctaccaactcggagttcattgcgatgatagctgataagatgcggctggataagcggcagagagtggggtaaaaagccgaaataaacggaagcggacatacaattatagaaacatgggataacccaaaggcttcatctgaaaaggtggagccttttctctttgcattttccttcccatctggtacaatggtgcagaagggaagtgacaaaatgccggaagtggatgtgatccgtgcgcagctgtttgcgctgcaagacaaggaatatcagatctttcacagccgcctgatgcccaccctgccaccggaaacggtgatcggggtgcgggtgccgctgctgcgtaagctggcaaagcagctgacagataccccggaagcggaggcgtttctgcaagaactaccgcatttttattatgaagaaaacgctctccacgcctttctgctggagcctgtccgggattacggcatagcgctggcggcaactgagcgctttttgccctatgtagataactgggcagtctgcgatagcttcagacccaaggtgtttgcgcagcataagccggagttgctgtgtgctatccggcgctggctgagctctgaccggacatataccgtgcgctacgggatcgggatgctgatgcggtattatttggacgatgccttccggccggaatatctggcttgggtggcggcggtgcacagcgaggaatactatgtcaatatgatgcgggcgtggtactttgccactgcactggcgaagcagcccgcagcggcactgccgtggctgaccgaaaagcggctggacgtgtggacgcacaacaagaccatccagaaagcagtagaaagccgccgcatccccccggaacaaaagcaagctttgcgggcactgcgcattcgttcacaaaagctttgcgaagaacgacgcgtttgactgtttacaatgtggcgaatttattgtaaaatagagtatagcaaaaatgccggctctgtccggcgaaagataaaataggtggtgtttggattatggcattgaaatataagcgtatccttttgaagatcagcggcgaggcgctgggcggcgaaaagggcatgggctttgacgagcccaccatggacgctatttgcggcggcgtgaaaaaggcccatgagcttggcgtgcagatcggcatcgttgtgggcggcggcaacttctggcgcggccgctccagcggtaagatggagcgcacactggccgataagatcggtatgctggctacggtgatgaacgcactggctgtctccgataagctggagcagctgggtgtgcccactgaggtgttcacctcgatcaccatgccgcaggtggcccctgcctttacccgcaaggacgctctgcgcgccatggatgagggcaagatcgctgtgttcggcggcggcactggcaaccccttcttctctaccgatacggctaccgcgctgcgcgccgtggaggtgagcgccgatgtgatgttcaaggctaccatggtggacggcgtctacgataaggatccccacaagtacccggatgccaaaaagtacgatacccttacctttaccaaggtgctggaggatcagctggccgttatggacggcaccgcagccaccctgtgccgcgacaacaagctgcccattctggtgtttgatctggccgacccggacaacatcgcacgggctgtgcagggcgagaacgtgggcacgctggtctacgagggctgagcatagcgccccggtgcaactgcatacgattggatagagcagcagcggcgcagtgcgctgcctgcatggatcaatagaataaaagaaacaggagaacaacgacaatgagcagcaacaccaaggtttacgaagataagatgaagagctctgtggagcacctcagccgcgagctggccgctgtgcgcgcaggccgtgcaaaccccgccgtgctggataaggtggtcgtggactactacggtgctcccacccccatccagcagttagccgctgtggccgtctctgaggcacgcaccctcaccatcaccccttgggaccgcaccctgctgcgccccatcagcaaggcgatcatggccagcgatgtgggcatcacccccattgatgacggcgttaccatccgcctgaacttccccgcacccaacgaggagcgccgcaagcagctggccaaggaggtctccaagctgggcgaggacgccaaggttgccgtgcgtaacgtgcgccgcgacgccatggataaggccaaggccatgaagaaggccggcgagctgaccgaggacacccagaagaccatggaagaggatgtccagaagctgaccgataagtatatcaagaacattgatgctgccgtggaagaaaagcagaaggagatcatggccgtctgatccgcagcacacaataacaactgggaggtgccgtgcgctggtgaaaggtgcgcggcactttttgcagggcagccctgctgccgggaggtataaatggcacaccccaaagaatttgccgaggggctttccatcggcatcatcatggacggcaatggccgctgggcgaaaaaccgcggcctgccccgcaccgcaggacacaaaaaaggtgcggcggtgttcaaggatattgccaactactgcgatgaacttggcgtagcatcggtgtatttctacgcgttctctactgagaactggaagcgcccgctggaagaggtgggagccatcatgaagctgttcgcccagtacctcatcgagggctttgattacaaaaaccgcaatatccgcattaagttcttaggcgaccgcaccgcactggatcccaagctacaaaagatgatgaatgaactggaaggggactctgcctgcaagaccggcatgaccctgaacatcgccatcaactacggcggccgcccggagatcgtgcgggcggcgcagcagctagccgcaaaggctgcagcaggcgagatccgccccgaggacatcaacgagcagatgatgagcgatgccatgtacaccgccggacagaaggacccggactttatcctgcgtcccagcggagaaaagcggctgtccaactttatgctctggcaggccgcctattcggaactggtggagatggatgtgctctggccggactttacccgcgccgatctggacaccgccattgaggagttcaaccaccgcagccgccggttcggcggcatctgagcggcaatctgtccgtattgcaaaccctgcacctgtggtgcagacccgacagacccggtacttcctcgggtcggaatgcgttgccctgcaaggggctgctgccggaagaacaaaggagatcaaacctatgaaaacacgcattattactgcgatcgtgggcattctggtgctcattggcgtgatgtttaccttcaacaccatggtgttcaatctggtgatcgcagccatcaccctgatcgccatccacgagatttacagcgccctcggctttgaaaaaaaggactggctcatgtacgcagtgctggtaccctacacattgctggtcatgctttccagttacagcgccatgcgcaagctggtcatgcccatgtcttttgtgctagtaaccttttttgccatttatctggtggtgcgcaacggtaccatcagctaccagaaggccagcggtcttttggtgttttcgggcatcgtgatcttctgcttctactcttttatcctgctcaaggaacgtctgccggtggaaaaattcggctatgatgcggttttcttcatcctgctcatcctctgctttgcatggggcggcgatacctgtgcctattttgcaggccgcgcctttggcaagcataagctgtgcccggtggtcagccccaaaaaaacggtggagggagccatcggcggcgtgctgggcaccatggtgttcggcgtggtcgctaccctcatctactccatagcggcaaaccgcatggaagcctttacccgctccaacatcggcgtttctatgtatgttatcattgcactgctgggctgcatcgctgcggtgctgggcatctacggcgacctgtttgccagcgtggtcaagcgccagtgcggcatcaaggattacggcaccatcttcccggggcacggcggcattctggaccgctttgacagcgtgatgttcattgcgcctttcgtgaccatggtcattaccgccgtgttctacgcctgatacaggggaggaaactgttatgtctaaaaaaattacgctgctgggttctaccggctctatcggcacccagagtctggatgtcatccgcgctcaagggtacgaggtctacggcctttctgcccacagccatgtagaaaaaattttgcagcagattgaggagttccacccgaaatacgtctgcatgaccgacctggacgccgccgcaaggttggatgccgctctggcaggccgggcaaatgcgcccaagctgctcaccggcccggaggggctgaaggagctggctgcgctggacggaccggacgtggtactgaacagcgtggtgggcattgccggccttggtgccagcctgtgcgccatcgagagcggccacgacttggcactggccaacaaggagagccttgtcaccggcggtcatctggtcacgcaggctgtggaaaagcacggcgtacagctgcttcctgtggacagtgagcactccgccatcttccagtgcctgcaggataaggaaagcgcccccagtctgaccaaaattctgctcacggcctccggcggcccctttttcggcatgaccaccgagcagctgcgcggcaagacccgcgcagacgccctcaagcaccccaactggaacatgggcgcgaagatcaccatcgactccgccaccctgatgaacaagggtctggaactgatcgaggctgtatggctcttcggtctgcccccggaaaaaatccaaatcgtggtgcagcgccagagcatcgtccactctgcggtgcagttcagcgataattcgatcatcgcgcagctgggtgtgccggatatgcgtatccccatccagtacgccctgacctatcccaagcgtgtgccgggcgtagtaccggagctggactttaccaccctgaagctgctcaccttcgatgtggccgacgaagagaccttccgttgccttgccgcctgcaaaaaggccattcgcaagggcggtcttggcccctgcgccgccaacggtgccaacgaggaagccgttaagttgttccttgaggacaagatcggctttttggatatcggccgcttggtggaggctgttgtggatagcgacagctttggcggcgactatacgctggcagacgtgtacgagtgcgaccgcatggcgcgcgcattcgtgcgggcacacctgtaacgctttatcagcaatatacgcctcggcgctgtttttgtaacagttccggggcggtataggagaacgaatgtcatttattatcaccatccttgccgcgctgctcgtgttcagtgcggtgatcgccatccacgagtttgggcattttactgtggcaaagctctgcggcattcaggtcaacgagttttccatcggcatggggccggtgctctggaaaaagaatcataaaggcacccagtacagtctgcgtgtcctgcctgtgggtggctttgtagcgctggaaggggaggaaagccccgaaagccagcaggcagaagctgcccatactgtgcaggagcagcccgccccggagacggaagcacctgtgcagcccaccggcatccccctgaacgaggcaccggtgtggcagcgggcactggtcatggtagccggtgctgtcatgaatttcgtgctgggctttgtggtgctggtgtttttgatcgccgcccagaatgagcccattaccagcaagaccatctacgccattcaggacggtgccctctgcgggcagaccggcctgcaggcgggggacaaggttctggcggtgaacggccgccgctgctttgtggccaatgatatcctgtacgagctggtgcgcacccggtcttacagcgcagattttaccgtcctgcgggatggccaaaaggtgcagctgccgggggtgcagttcgacacatggcaggacgaacagggtgagacccacatgagcatcggtttttccgtctatggactggaaaagacccccggtaacgtgctgcgggaggcgagcaacagcgtgctgtattatgggcgcatcgtgttcacctcccttgtggacttagtgcgcgggcgggagagcatcaacaacctctccggcccggtgggtatcgtgtcggccatcgggcaggccgccagctatggctggcaggacttgctggagctgctggcgctgattaccgtcaaccttggtatcctcaacctactgcctttcccggcgctggatggcggcaaggtggtatttttggtcattgaaggcgtcaccggccatgcagtgccggaaaagctgcaaagcatgctcacccttgcaacctttgggctgctgttcgggctgatgatctttgcaacctacaacgatattctccggcttattaccgggacagtataagaaaggggaacccttatgcggcagaaaaaacgtgaagtgaagatcggcaatgtgaccattggcggcagcaaccctattgcggtgcagaccatgctcaatgtgccggtggaggacatcgagggcaatgtgacacaggctaagcggtgcgaagccgctggctgtcagattttgcgggtgacctgtcccagcccggcagatgcaaagtgcatcgaggccgtcaaaaacgcagtgaacatccccatcgtggcagatatccactttgactacaaggctgcgctggcctgcgcggatgtgggtgtggataagattcgcatcaacccgggcaacatcggcgatgacgaccgggtaaaggcggtggtggatgcctgccagcagaagaacatccctatccgcatcggcgtcaacggcggcagtctggaaaagcacattctggcccgctacggcgcacccaccccggaagctatggtggaaagcgctttgtaccatgtgcggctgctggaaaagttcgatttcaataacatcgtcatctccatcaaaaactctaacgtgccccgcatgatggaggcctaccgccagctcagcgccgtcaccgactacccgctccatgtgggcgtcaccgaggccggtacctatcagatgggtctgctgaaaagtggcatgggcatcggcgggatgctgctggagggcatcggtgacaccatccgcgtgtcgctggctgccgagccggaaaaagaggtggaggcaggcttcaacatcctgcgtgccgtgggcttcccggtcaccggaccggaggtcatcacctgtcctacctgcggacgcacccagtacccctgcacagagatcgccaacgaggtggaaaagcggctgcagggctacaaaaagtccatcaaggtggccgtgatgggctgcgttgtcaatggccccggcgaagcccgcgaagctgatatcggcattgcgggcggcaagggcgaggctgtgctgttcatccacggcaagcccatcaaaaagctgaccggcgataacattctggatcagttcatggacgagatctataaattgtaagcattttttccctactgccacacccgcaaaaacgggtgcggcagtttgtgctgtaaagaacccaccaaaaaggagtaccatttgtgaaaccacttgtttcccagctgtggccgcagtttatggcggacccggattttgcagcctgcttcgggcaggtgatcgtggagcacgcccggatgctgcggcaggaccggcaggtcgagtttactttgcgcagcgccgccccgctggaccagaatctctgcgcccggctgcttgcttccctgcagccggactacgagggctttgaactgaagattaagaacctgttcggctatgccatgctggacgagcacgctttgcgcatcctgctggaggacatgaagcgggacggtgtgcccatcaacggctttctggacaggagcagcattaccatcaccgggcagaacatcacggtgggggtgtgccacggtacaaagtttttgcaggagatgggctttgaagaactgcttgcaaagcgcgttgccgagcataccggcgttacccccaaggtgacgctgcaaagcgcagtgactgcggcggagcagcagcagatggaggaaaagctggagcgcaagatcgcaccgccggtggtcaaattcgagaaaaagaacaccgcaccgtccatcaaggtggagggactcaatcttaccgacaagccggtcaccatcttccacggcaaaatgttcacccccaaaaatcttacgcccctcaaggatctgggcggcgagggcggcaagtgcatgatctggggcgatgtgttctttactgaggtcaagggcaactaccgcaagatctatactgtgtccatcaccgactataccggatctatcaacctgaaggtccgcgcacaggaaggggaggactgctccaagtgggagggcatcggcaagggcagcacggtcatcgtgcggggcgactgctcctacgataaatacgagcacgactacatcgtgtacccctacgatgtgctgatcgtggagcgcaaaaagcgggaggataccgccccggaaaagcgggtggagctgcatctgcataccaagctttccagcatggacggcttctgcgaccccggcggcatcgtcaagctggcgcaccgcatggggcatcccgccattgccatcaccgaccacggcgtgtgtcagggttacccggaagccatgctggcagccgacgacatccacaaaaaggacccggattttaagctcatctacgggtgcgaagcctattttgtggacgacatggtgccctgcgtttacggcgtaaaggatcagccgctggacggcgagttctgcgtgtttgacaccgagaccaccggccttgaccccggggtagagtaccttaccgagatcggcgcggtcatcatccgcaacggcgaggtggtggaggagttcgatacctttgtcaagcccggtaagcccatcacccccaagatcaccgagctgaccggcatcaccaacgagatggtagcggacgcccccagcgaaaaggaagcgctggaagcttttcttgcctttgcgggcgaccgcattctggtgggacacaacgtccacgcctttgatatgcgctttctgcgggcagcagccaagcgcagcggcatcaagctggagcctacctatatcgacaccctgaccatggcgcagaccatgtaccccggtctgcacaactataaacagggcaccatcaacaagcatctggaactgcctgcctacgaggcgcaccgcgcctgtgaggactccgctgcactgggacgcatcttctgcgtgatgctgaacgacttagcggaaaaagaggtaacgaaggtcagcgagatcaacaccggtctgggcggcaaccgtgaggtgctgaaaaagaaatactaccacctgatcattctggtcaaaaaccagatgggtctgaagaacctgtacaaaatcgtcagcgaggcacacgtcaactacttcttcaaaaagccccgcgtgccccgcagcctgctgaacaagtaccgggacggcctgctgctcaccagcgcctgtgaggcaggcgagttgtaccgcgccatcgtggacggcaccagctacgaggaactgaaaaaaattgccgcctactacgatatccttgagatccagccgctgggcaacaacgcctatatggtgcgggacggcaaggtggacagtgaggaacggatcaaggaattcaaccgcaccgtcatcaagctgggcgaggatctgcacaagccggtcattgccaccggcgacgtgcactttaccgagccggaggatgcgatctatcgcgctgtattacaggcgggcaacggctttaaggatgctgacaatcagccgccgctgttcttccgcaccacgcaggatatgctggcgcagttctactatctgcccaaggaaaaggcctacgaggtggtagtaaagaacccccgcaagatcgccgccatgatcgacaacaatgtgcgcgccatcccccggggtacctacccgcccagcatcgagggtgcagagcagcagctgcgcgatgccacatgggagcacgccaagcgggattacggcgaccccttgcccgagatcgtggaaaagcggctgcaaaaggaactggactccatctgcggccacggctacgcggttctgtacgtcattgcggtcaagctggtggcctactccaatgcgggcggctatcaggtgggcagccgtggttctgtcggctcctccgctgtggcgcacttttccggcatctcggaggtgaacagtctgccgccccactaccgctgcccaaagtgcaagcacagcgagttcatcaccgacggcagcgtggacgacggctttgacctgccggacaaaaactgccctcattgcggcacccgcatgctggtggacggccacgacatccccttcgagaccttcctgggcttctacggcgataaggaaccggatatcgacctgaacttctccggcgagtaccagtccaacgtgcaccgctataccgaggagctgttcggcaaggccaacgtgttcaaggccggtacggtgtccggtattcaggataaaacggcctacggctacgttaaaaagtatctggacgagcggcagcgcaccgtgaaccacgccgaggaaaaccgcctgacgctgggctgtaccggtgtcaaacgcaccaccggccagcaccccggcggcatggtggttgtgccggacacctacgagatctacgatttctgtcccatccagcacccggcagatgacgtagcgggcggtctgctgaccacccacttcgagttcaagtatttgcacgacaccctgctcaagctggacgaactgggccacgatatgcccaccttctacaagtattttgaggaatacaccggcattccggtagacagcatccccatgaacgaccccaaggtgtacagcctgctgaccagcccggaagcgcttggcgtgaccccggagcagatcgacagccagaccggcaccttcggcatcccggaaatgggcacgaactttgtgcgcggaatgttggtggaagcacgccctaagaatttctcggagttgatccagatctccggtctgtcccacggcacggacgtgtggaccggcaacgcggacgagctgatccgcagtggcacctgcaccatcgccgaggttatcggctgccgtgacagtatcatgctgtatctgctgcgcaaggggctggaacccaagatggcctttgatatcatggaggccgtgcgtaagggcaaggtggccaagggcggtttccagccgggctgggaggaagccatgcgggagcacgaggtaccggactggtacatcgagagctgccgcaagatcaagtatatgttccccaaggcccatgctgtggcatatctgatgagtgccatccgcctgatgtggtacaagatctacaagccgcaggccttctatgcggtgtactttaccgtgcgcggcgatgatatcgactacgaagccgccattggcggtgctgccgtggcgcgtgcccacatggaggcggtcaagcgccgcctgaaagaggaaaagaacgccaaggatgaggacgtgctggtcagcttgcagctggtcaacgagatgctgagccgcgggtacgagtttttgcccatcgaactgggcaagagcctcggttccaagtatgtggtggaggacgacaaggtgcgtctgcccttcagcgccctgaagggcctcggcggtgccgccgccgatgcactggagcgggtgaccatccacggagaggaatatatctcggtggaggagctgcagcaggcctccggtgtgggcagcagcattctggaccgtctgcgtcaggtgggcgcactgggcgacctgcctgagagcagtcaggtaagctttttctgagaaacaaaggccgttgcacagattttgtgcagcggccttttatcaggtctggacgattttgaatacccgctgcgtgtgctttgggcattttcagcggaaaggtttttataatttccaagtctggaagttctgcggaacttccagacttgctttttcgtcagaaaaagaggctgccgcacggaataccatgcaacagcctctttatattttgcgataatatcagatcagagaagtacttactccacgctgatcatatagtagtaaacgggctggccgccgcggatgtggcttacttccacatggttggggcattttgcctttacgatctcggtaaccttttcggcgtcctcgtcgctcacgtcacaaccggaaatgatggtgacgaagctggaatccttcttgcacatattgcgtgccagacggtaggtggccttggtgatatcggtggaggtggaaacgatcttgccgttctccagtgccatgatctcgcccttgcggatgcgcttgccgtcgtactcgctgtcgcgggcggcgtaggtgatcagaccggtggacaccttgtcggcagcagccatcatgttgatggtgttggtctcggcattcacagaggggtcaaagttcagcagtgcggtaatgcccatgggcacggtgcgggtgggcagcaccaccacctgacggtccgccagcttctgtgcctgctcggcagccatgatgatgttcttgttgttgggcagcacgaacacggtcttggcgggcacactctggatggctgccagaatgtcctcggtggaggggttcatggtctgaccgccagataccacagcgtctgctgccagatcggtgaataccgccttcagaccctcaccggcggcaacggccacaaagccgtagtcacggctggggtccacggcagcataaatgaactcactggcctgagagggagccttctcggcagaagcctgcttttcaaggctcttgccctgcttctggcgggcgaggaactgctcgtgcatattctcgatcttgaagttggtcaggtagccgtacttgatggcctcgctcaggatcttgccggggtcggcggtgtgaacgtgcaggttgatgacatcgtcatcctcaatgcagaccacactgtcgccgttggactctgcaaaggcgcgcatcttggcggcgctggcaccctcgtacttattgatgaggaactgggtgcagtagccgttggtaatgtcctccaccttcatcaggtcgtcagtaaacacgcccttaccggcattttcagtggacagctttgccttgttgggggcagcctcaccaccggcaataatggcctcgccgtggaacaccttgcccatgccctcaaagatgaccatgataccctgaccgcctgcgtccacaacaccggccttcttcagcacgggcagcaggttgggggtatcctccagtgccttctggccggcagtcagcaccacgtcccacagggcgggaacatcggcggcatcactggcagcggcttcctcggaagcaacgcgggcaacggtcagaatggtgccctcggtgggcttcatcacggccttgtaagcgccctcaacacccttctgcagggcagccacgatatcggcaacgtcagcctcttttttgccctccaaagccttggagaagccgcggaacagcaggctggtgataacgccggagttgccgcgcgcaccgcgcagcatggcagaagcggcagtcttggcagcttcgcccacggtgcagctgtcgtccagagcctccagctcacgcacggcagagcccacggtcatgcccatgttggtgccggtgtcgccatccggcacagggaaaacgttcagctcgtccacgcgggaacgctggttgttgatgttgttggcgccggaaatgatggcgtcgcgcaggatcttaccagaaatcattgttcttactccttagtaactggccggaaaatcccggctcgggtttgcagacaaatcaggcgatgacgtcatccacggacaccaccacgcgggcgaccttcagcccggtggcctgctccacctcgtccttgacacggtgggagatgctgcgggcggcggtggaaatgttcagaccgtagctgacggcaatgtgcagctcgatcaccagacgaccattctgctgggtcacgcgcacacccttttccgggtaatcggaaccgtataccatgcttttcacagcgtcagtcatatcacggggagccatggcagcaacgccgtagcactgtttggtggcttcacccaccagggtggaaaaatacccatcagtaaagctgacattcccaagcgggaaacgggaagtgatcatagtcgctctgctcctttatgttatttttcataaaaatacacgcaagggtcgggggcattggctgcgcaaaacaaagcttgcctcagataaacacccactctattatacaactttgcaccgtggttgtacagttcaaattgttggatttactgctttttgctctctttttgcatggtttttgtaaagaaaaaagagagaactgccctcgacaacgctcgtgccactttgcgtagcggccgtggtatgctgaaggcaggctgtgcgaaacccatcaaaacggaaagtatgacaaataaagaaaaacaatctgtgaataaaatataaaagcttccttgtctggctttctttgtctatggaaaagtgctaaaatataaatgaaaaggaaaaggggcggtcagtcccctttttccatgatacttcccggaatacgccggacgcacggcacattacatagcgcgggcagacccttccaacaggtattgcctgcaaaaaatgcgataggagttgttggcatgaacattctcttttttctttccccaaagcaggatctgatgtacgtttacgatgatttcaccctccggcagacgttggaaaagtgggaaaacaaccgctacgcctccattccggtgctgaaccgcaagggcgaatatgtgggcacgctgaccgaaggcgatatcctgtggggactgaaaaaataccatggtctggatctggaagccgccgaggacatccccatctcagagtttgcgcataagcgggactacaaggccgtcacggtgaccaccagcatggatgagctggtggaagccgccatgaaccagaactttgtcccggtggtggatgaccggggcagctttatcggtatcgtgcggcggcaggccatcatccgctactgctacgataaatcccgcaagatcgaaatgacccgcaccggccgccccgtaaaggaactggctggcgtacattaaaacagatgccgttttcggcagtgtccatcccgtgaaaatgtaggcccggaaagtccgcagactttccgggactactctgttcataacaagatctgcgctgaaaaagggcgctgcacggtaaatgtgcagcgcccttattgctatttgttacttgttgcggatgtactcgtccatggcctttgcagctgccttaccggcacccatggccttgatgacggtagcagcgccggtcacggcgtcgccgccggcgtacacgccgtcacggctggtcttgccctcgtcaccctcggtcacgatgcagccgtgcttgttggtctccaagcccggagtggtggagcggatcagcgggttggggctggtgcccaggctcatgattacggtatccacctccagctcaaactcgctgccctgcttttcaatgggacggcgacggccggaagcatccggctcacccagctccatctcgatgcaggtcatggagtgcacaaagccgtcctcgtccgggtggatggcaacggggttgcacagggtcttgaagatgatgccctcttcctcggcgtgctccacctcttccttacgggcgggcagctcagccatgccgcggcggtatacgatatacacgctctcggcacccagacgcagggcgctgcgggcagcgtccatagccacgttgccgccgcccacaacggcgaccttcttgccggtgcggatgggggtcttgctggtgggcaggtaagccttcatcaggttggagcgggtcaggaattcgttggcggaatacacgcccttcaggctctcgccggggatgttcataaagcggggcagaccggcaccggagcctacgaacacggcctcgtagccgtactcgcccatcagctcgtcaatggtcagcaccttgccgatgaccatgttgcactcaaaatccacgcccatcttcttcaggccgtcgatctcctgctggacgatggccttgggcagacggaactcggggatgccatacatcagcacaccgcctgcaacgtgcagagcttcgtaaacagtcaccttatagcccagcttagccagatcgccggcggcggtcagaccggcagggcctgcgccgatgatggcaaccttatggccgttccattcgggtacgatgggtgcggtgtgcacgttctcgcggtgccagtcggctacaaagcgctccagacggccaatagccaccggctcgttcttgatgccgcgggtgcacttgccctcgcactggctctcctgcgggcagacacgaccgcagacggcaggcagggaagaggagcggttgatcacctgataggcggcttcaaagtcgccctctgcaacgtgagcgataaactccgggatgtcgatgcccacggggcagccggactggcagggcttgtttttgcagccgatgcagcgcttggcctcgttcacagccatctcggcggtgtagcccagagccacttccttaaagtttttgttgcggacgttggggtcctgcgtgggcatggggcactttttgggatccatattgaaagccattttacattccctcctgagtcttgaacaggttgcaggctgcctcacgggcgtgtgcctcaaacgggcggtacatggtgccgcgtgccattgcctcgtcaaaatccaccagatcgccgtcaaagtcggggccatccacgcaggcaaacttggtctgaccgcccacggtcaggcggcagccgccgcacataccggtgccgtcgatcatgatggggttcatggaaacgatgctcttcaggccgtgcttctggcaggtcttgaccacaaacttcatcatgatcagcgggccgatggtgatgaccagatcgtactggttgccggcagctaccagctcgtccagcgcagcggtgaccacgcccttggtgccgtagctgccgtcatcggtcatgatgcgcagctcatcgctgcaggcgttgaactcgtcctcaaggatcagcagatccttattgcggaagccgaccacgctgtgcaccacacagccctgatcgtgcagttccttggcaatgggcagtgcaatggcgcagcctacgccgccgcccacaacgcacaccttcttcagaccctcggtctcggtggcgcgacccagcgggccgacaaaatcgtggacacaatcgcctgcattcaggctgttcagctccatggtggtaccgcccacgatctggaagatgatatctacggtgcccttttcgcggtcgtaaccggccacggtcagggggatacgctcgctgtcctcaaacggacgtacaatgatgaactgacccggctttgcctttttggcaatcagcggggcttcaatgaccatctttgtcacggtggggttcagcgcgaccttttcagtgatcttatacattgcgttagctcctttttgctggcaattcctttttcttttctataaatggaagctgcatccgcgcgggtgcattttccgtttgacaaagcgtcctctttattataatagtttgtgaaatagaaagcaactgtattttgcccgtacacacagccgcgtgaaacgaggtgaaaagaggggatgtggtgctgcacacaaaataaaaagaacgtaccagagttaaaagacattcttttttgaaaaaatgtaattttgtggttgacaactgccggagtgtgcggtataataaccaacgtcgccggacaacagaccggcaaaaacaaatggaatgtgcggccgtagctcatctggtagagcgccaccttgccaaggtggaggtagcgagttcgagcctcgtcggccgctccatatgtggaagtttagctcagctgggagagcatctgccttacaagcagagggtcagcggttcgagcccgttaacttccaccatatggcccggtagctcagttggttagagcaccagcctgtcacgctgggggtcgtcggttcgagcccgatccgggtcgtatttgcctctgtagctcagtcggtagagcaggggactgaaaatccccgtgtcattggttcgattccgatcggaggcaccacgtcgaaagtcgtgtaagactttctcctcttcctcacaaaactttgcttcgcaaacttctgcgggggccccgaaattcgcaagaatcgctcgggagggtgcagggataaatgcaccggatatgcggccgtagctcatctggtagagcgccaccttgccaaggtggaggtagcgagttcgagcctcgtcggccgctccaatacgaagccatcgttgatgcagaaatgcaaaagcgatggcttttttgttttgtgtggcaatggtcgaaaatgttctccgcttgccaaagcaaagagccgctgtacaacacgatgcacggcggctcttcttacaatataaatatggcaccgccgcgcagcgtcttacatcaccatagtaataatgagcgcacaaagcggcagggtgacgatgctgagcagggtagtcagcaccacgcttccggcggcaaagtgctcatcgtggccgaactgcaccgcaaataccgaggtgatggcggcagccgggcagcattccagcagcgtgaccacctgtgcagcagtgccgtggaagcccagcaccccgaacagtgccagcgtagccgccgggatcagcagcatacgcacggaggcaagcttccagatgtgcttgtcggtcacgatgctgcgcacgtcaccggcagcaatcagcataccggtgatgagcatggacagcggggtgttcaccccggccagcagctccagcggctgggtgatcagggcaggcaggggaatctgcagcagatagatgcccagccccaccacaatggcgtacagcaccggggtgcgcaccagactgcgggcaacctcttttacgctggaaccgccgctgacaaggccataacccagcgtccacagcagaatgttgaacacggtgacgtaggcactggcatacagaagaccttcggagccgaacagcgccgaaataagcgggaagcccatgtacgctgcgttggaaaaaatgcaggcaaaccggaaaatgggcatccggctgccggtcttgtgtgccgtgagcagcagggtgatcacggtgcccagcagcacggacaggacactcatgccaaaagccgccagcagattatgcaggatctgggtgctgaactccatgcggtaagagtttaccaccatggccggtacgatgatgtacaccagcagattggaaagcgcctgcttgttttccagcttgagcacgccggttttgaccgccaccatgcctgtgccgatcagcaggaacaagaccgcgacctgctgcgcggtgatgagagccagttccataaaatttcctcctctgggtcgtaacgagtatactacgaaagatacaacacaggtatagcacaaaaccctgcggatagcaaggctaaacgcagggttttgcaagattttgctgttacagcttacaaaatgacatttttgatcagcagggagatgctgccgtcatcagcgtgcaggaactctacctccgattcagcgttcaataactccgtggggatcttcacttcaatgccgttggcggtgcgcaggctgcggctctccatgcggcggatgcgggcgggagtcacggtcaccggctgggcagcgctgtcaaggacatcgctcttttccacatagtcgtcaaagggcacggcggcgaggggatattcctcttccagctgctggcgcacctgctggatggacacctgattgtcgttgtcggcggcctgattggcgatcatcatggccacctgtgcctccacatggggcgtttcggcgtagttttcctgcacagcctgcacggcggcttcctgaatagcctgcagctttttcttttccggctgggcggtggtgtactggaacaccacggtggaaaggtaaaactccttgtggccgtcaatatcgtacttcttttccagcagccgcatggagtaatcggtcaggtctaccagtgcgccctcctccaccttgccgctctgggtaggcaggcaggcgcgctgctggatgatggagttcaccggtgcaccctctacggtttcggtatagtgggtgtagccgtttttgtagttcagcttcagaatgcccagccacggcgcaccgtcccgggtaaaatccaccacggcaaggtctgccccggggatggtggtgtgggcgtgcatatagtcgaacagcaccccggcaatgcggcaggaaagatccacgaagtcctgattgtgctccagctcatttttaaaggctgaatccggcagcgggcggcactggcggatgtcgtcgctggccagcagcttttcaatgtgattttgcaggtaggcgtttttttcggcggtcagctccatgggcccgccgctgagcaccggcgcatccatggtggtatccagaacgtgcagaatggcctgatgaatgatgatctccattgttgctcctcatttcgtgacatagtgtttgcgcccagtatagcacaaccgccggaaaaaggcgagagccgcccgggtattttgcggattctacaatttacaaatcccgccaaaagggctatacttataatatctgtgcaaaaggaggtggaattggtggacgagcagttggaacagattgaaggcgtcgtggaggatatcatctacgagaacgaggataacggctatgtggtgttcgaaatctccggcagcggggtgctcacggtggtctgcggcatcgtaggcgagctacacgcaggggaaagcgtcatctgccgcggccgatacgaaaaccacgccacctatggccgccagttccacgcgcaggaatgcgaaaccgatatgcccaaggatctggaagcggtgtacgcctttctggcaagtcgctccctgccgtatatcggggcaaaaactgcggataagatcattgatatgttcggggctgaagcgctggaggtcatcgccaacgaccccgcccggctgactaagatccccggcatctcgccggataaagccgatcgcatccagcaggagttcaagcggatgttcggcatgcgggagctcatcgcctatctggcgcagttcgagatcagcccccgcaaggctatggaggtgttcaaggcctttggcgtgggggcaatgcaggccatcgcgtcaaacccctatctgctgtgcggcgagccgctgcagctggacttccgccacgcggacagcatcgcccagtattaccacatggaaggggactgtgcccagcggctggaagctgccctgctgcgcactttgcgccataatgcaggcaacggccacacctgcctgccccgggcacagctgctggccactgcctccaacttcatccatcagccgccggaaaagctggcccgtgcactggatcattgcatcgagacggaagaactgtgcgtgaaaatgttcgatgcggtaccttatatttacctgccggatctgttggctgcggagcaggacattgccgaccggctgaatctgctggcaaagcgcggcaagaataccgtgcgggagctggataaaaacatccagatcttagagttgacgcagggctttgcctacgcccccctgcaaagggaagccatccgcaaggctatgacagagaactgccttgtgctcaccggcggccccggcactggcaagaccaccacggtcaacgccattttgcagctgctggaaaatcaggccgagcgagtagccctgtgcgcccccaccggccgcgccgccaaacggctcagcgagctgaccggccgcaaggccagcaccattcaccgcctgttggaggtggactacaccggcggcgtggtcagctttatccacaacgacaaaaacctgctcaagtgtgacgtggtcattctggacgagatgagcatggtggatgtcaagctgtttcaggcactcattgcggcactgcgctacacctgccgtattattatggtaggcgatgctgaccagctgcccagtgtaggcgcgggcaacatcctcagcgaggtcatccgctccggctgcgtgcccactgtctgcctgaacgagatcttccggcaggcaaaacgcagtctcatcgtggaaaacgcgcaccatatcatctccggcgagccattgcaaaagggcagcaagactgacgacttcttctttctggagaccgacggcgaggccgcgcagcgtctggtgtgcgaccttgttaccactcggctgccccggagctacggctttgatcccatccgggatattcaggtgctgtgtcccacaaagcttggccccaccggcacgcaggcgctgaacgtggagctgcaaaacctgctcaacccgccccagaaaggcaagccccagctgcaaagcgccgcccgagtgttccgggtgggggataaggtgatgcaggtgcgtaacaactacgagatcgtctggaaccgcatcggcggcgaacagggcgtaggtgcctacaacggcgatatcggcatcgtggaaagcatcaacctgcgggagcgctccatggtggtgcgtatggacgaccggcggctgctctacccggcggaaaacctgaacgagttggagatcgcctacgccatcacggtgcacaaaagtcagggcagtgagttcccggcggtgatcctgccggcggcgcaggtgccgccaaggctgtgttaccgcaacttgttctacaccggtgtcacccgcgcgcgcaggctgtgcgttgtggcgggccgcagggatgtggtgaacagcatgatgagcaacatccggcagaatctgcgttacagcggcctgtgcgctctgctgcaggccggacagtcgccacagcagctcagcacagaaggggaaagcccctgataaaaccgcgcagaacagcggcaaagcttgtatactttttgccgcaactatgttatactaaaatagtctttgtttttttgcccgccgctgcgggcgttacatacatgatagaggaacgcagagaaaggattcaggcaattatggcacagaatgatatcggcatcgaccttggtactactaccatcatcatcgcgcaggagggcaagggcgtggtgctcaaccagcccagcgttgtggcgatggatacccgcaagaacaccgtgttggaggccggcgataaagcactggccatggtgggacgcacgcccaactatatctccgccatcttcccgctgaaggatggcgtcatcagcgaccacaccatgacccgggagctgatctgccgttttgtcaagcaggtgtacagctcccacatggtcaagccccgggtggcagtgtgcgtgcccgccgccattaccggcattgagagcgacgccgtggtggaggctgtggtggcagccggtgcccgtcaggtgtacctgatcgatgagcctatcgccgcagcccttggctccggcatcgacatcactctgccggacggtcgtatgatcattgatatcggcggcggcaccacggatatcgccgtgctgagccttggcggcaaggtcaaggccaccagtgtgcgcgtggccggtaaccactacgatgaagagatcctcaagcacgtccgcaacaaatacagcatcgccatcggccagcgcaccgccgaggaactgaaaaagcacgttgcctgctgcccccaaaagaccgatttccacgagagcatggagatcaagggtcgcagcctgcttaccggtctgccggtgcgcgtgaccgtttccaccgatgatctgtacgagccggtgatgatgctcagcgagcagatcggcaccgcagcccatcaggtgctggaaaagactccgccggagctggcaggcgatatctaccgtaacggcgttatgctgaccggcggcggtgcccagctgcacggcctgaccgaatatctgagccaggaactgaaggtggaggtcaccgtctcgccggaccccgtaaactgtgttgcactgggtacggcacagagcctttccatcggtgataagctggaaaccggctttacggatgccaccccgcgcatcggccgccgctaagtttggttcgttttgtccatgtcatatcacaaagcagcaaaaataaaatttgttaatttttgttgaaatgaatggcaaaatacggtatactatacccaaattgattttctgctaacgatgttgtatcgcttgcagtatccaacaaacaggaggaaaaaccatggacttaggtttcgatgtggtcgttaccattactggtatcgtgctggtgttcctgatcctcgtgctgctgatggctatcatcacgctggagggcaagatcttcgactcgatgaatgccaagaagaaggccgccaagactgctgcgcaggcacctgccgcaaagcccgctgtcgctccggtacagcaggctgcgcccgctcctcaggtagaggagggcatccccggtgatgtggtggccgctattatggctgctatccatgcaatgggcaacggcaagtacacccttaaggcagtgcgtcgtggcaaaaatggctggggcaaggccggcgtgaacgacaccacggccccgttttaacacaggaggaagagcatgacacagtttattgatactctggtcggtattttccaaagttccggctttgcacagtttggccagcccggcggctggctgtacgccgtgatgatctgcgtgggctgctttctgctgtacctcgccatcgtcaaggaattcgaacccctgatcctgctgcccatggcctttggcatgatccttgccaacctccccggcagcggcatcatccacatgcagtacttcgttggtgatggtctggagcaccccatgtgggtcgagatcctgaacaacggcggtctggccgatatgctttacatgggcgttaagctgggcatctacccgccgctgatctttctcggcatcggcaccatgaccgactttgcacccctgatctccaaccccaagagcctgctgctgggcgctgccgcacagtttggtatcttcggtacttacatgggcgctcgtctgttggtcgctactggtctggtagacttcacccagaagcagtccgctgccatctccatcatcggcggtgccgacggccccaccgctatcttcgttacctctcgtctggcacctgagctgctgggcagcattgccgtggcggcatacagctacatggcactggtgcccgttatccagccgcccatcatgaaggcattgaccacctccaaggagcgctctgtggtcatgaagcagctgcgcaccgtctccaagaccgagaggatcatcttccccattatggtcgctatcattgtttccctcatcgtgccggatgccgccgttctggtcggtatgctgatgctgggcaacctgatgaaggagtgcggcgttgtggatcgtatccagaagaccgccggtaatgagctgatgaacatcatcaccatcttcctggctctgtctgttggctgcaccaccagtgcaaacaccttcctgaacacccgcaccctgttcatcatcgtgctgggtctgatcgccttctccttcggcaccgcagccggtgtgctgtgcggcaaggttatgtacaagctgaccggcggtcaggtgaaccccctgatcggttccgccggcgtttccgccgtgcctatggccgctcgtgtctcccagaaggtcggccagagcgagaacccctccaacttcctgctgatgcacgccatgggccccaacgtggccggcgttatcggttctgccgttgctgctggtatcctgatcaacatcttcggctaagcaaaacctgaagcactatctcaagagccatcgcacagtcttgtgcggtggctctttttgtgcaggacgatttcaaatggccgccgcagtgctttggccattgtttaaggaaagtatattttaatatttgaggttctgaaacgcctgcgggcgtttcagaacccctttttcacagaagggggcgtaactggaaacggcagctgttatctcttacgtcctttcccgtgaaaatgggataatggagcgtccgcagacgctccgttatcccaaaattataaatcataattccgctgaatatggccagagcggcagcggagaccattcaaaatcgttttgcaataaggatgatagcaactttttactgtttgtgtttggctgttgcttgtgctatcatagagaaaaacagggcgcaaaacgccccaaaacaggagggagccgttatggaaaaaatcaagcttgaggtcgcaggcattccggctgtcctgtacggcaagcgcagccgtaaggtctatctctatgtccatggcaaaaacggcagcgcggccgaggcagcccgctttgcccgtacagcttgcctggcaggctggcaggtgctggctgtcgatctgccggagcacggcacccgaaaaaatagccgggaaaagctggtgccgtgggtggtcactcgggagctgcaaacggtctatgcccggatgcagccggtatggaagcatatccgggtgtatggggtcagtatcggtgcgtggtttgccatgcaggcgttgcagacgcaaacgccggaaaaagcactgcttgtctccccgatcgtggatatggaaaagctcatccttgacctgatgcagcaggcaggggtaacggaggagcagctgcgcacggcaggggagatccccacagactttggggagaccctttcgtggccgtatctgtgctgggtgcgggagcacccgctgcactggaaagtgcctacacaggtgctctatgctgatacagacccccttaccgggcacaccgccatggagcagttccggcagcagaccagggcgcacctgaccattctggagggcggggaacactggttccatactgagatccagctggccgctctgcaaagctgggaaagctgtcatttataataggccgtttctcttttcctcagtctgtgaaaatgtaagcccggaaaatccgcagattttccgggcttacatataaaatacgcttccacaacaaaacgccgctgacggctttgtgcatcgtcagcggcgttttgtttattgaaaacaggattgtgaatggcagaatcagacgtttgcctcgctgttgtgctcagccttcttgtaagcggagaaggagtggaacacaatgttcaggcccagcacgatcagcagcacggcaaggatcagctgcaggccgtttgcgatgaacacagcgccccaggtggtctcaccggcagggatggtaacagaagcggcggtgctgatggccttgaccatagcgatcaggcgctgcaccaatgcggtaaaggtaacgcacagcatgatgaccagcggggggaacagcatcttgttgctgcggccggtcaccttcaggaacacgcacagggtagccagcaccagtgcgctcagcagctggttggcagaaccgaacagaggccagatgttggcgtagccgatcttggtcaggataaagccaaacaccagcgtgatgaaggtggagaagtacacattgcagaacagcttgcgccagccctcggcgtgctccatgtcgtccacgctgaacagctcctggaagctcatgcggccaatacgggccacggcatccagactggtcagtgccagtgcggaaacacacatggtcatgaacacggtagcagcgtaggcgggcacaccgaacatctcaaagaaaccggcaacgccgcggctgaagatctggaacggagtaccggcagcaggagtaccgtcggcagctgcggcagcaccggcaacgcacagagccagaacagccaacaggctttcaagaatcatggcaccgtagccgaccttcagcatatccttctcgttctcaacggtcttggaggaagtaccggaggaaacaaggctgtggaaaccggaaactgcaccgcaggccacggtgacgaacaggatggggaacatggtgcccagcttttcgttggtaaagccggtgaacacaggcagattcatggtggggtgtgccaccagcaggccaaccacagcacccacaatcatggccacgaacataaaggtggtcatgtggtcacggggctgcttgagcagccacatgggcagcacagcagcaaagaagatgtacacaaaggtgatgtagctccaagcggccttgcctaggatcaggggcaagtttgcgccgatgacaaaggacagcacgatgaacacgatgctgataacgctttccttccagccggagaagctgaactttttctgcagcaggccaaagataacggcgaacaccatgaacatgatggacaccatgccggcagcgccgttggtcttggcagcctcaaccattgcgccgtctgcgccgaaggcattgaaggtgccggcaaccatgtccgcaaaagcggcaatcacgatgccgcagaacagccagcagaacagcaggaacagcttgcggccggtcttgccgatgtacttttcaatcagcatacccatgctcttgccgtcgttcttaacggaagcatacagagcgccaaagtcggtaacagcgccgaagaagatgccgcccagcagcacccacaacagcaccggcagccagccgaaggctgcggcctgaatggcaccggtgacagggcctgcaccagcgatggagctgaactggtgggcaaacaccgtccagccattggtgggcacatagtcccggccatcctcgtggacgacagccggagtcttggctgcggggtcgatgccccatttgttagccagccagcggccgtaaagcacataagcgccaaacaggcacaccgctgcgatcaatacgataaccagcgtattcatagttttctacctctttccttttttcactccgcaacaggttcggaacgataggatgccgtccggcaaagcgcttccccggagcgtaaaaaaccttcgtcctcagcacatgaccgggctttccggccacactccgaagacgaaggcttctgctcccgcctgccagggcaggagcaatactccgcggtaccacttcgcttgctgtgttaaaacagccactctcccacgcatggtatactgaccatgctgcccgataacgtgggctggacggcaccatgctacttgggggcacaaaacccggttcacacaggctgctcgcaggcgagggtcctctgctcctgactgccgctttttcacccgagaagcggctcgctgaaagagggtgatgcagaagatcatgtcctgttccttgcatttgctgaatgattgtgtcctactttattcccgttttcatcaattgtcaatatttctgtaacaagttcagaggatacgccaattcaagccattttctgggaataatttttagatgattttctttcatgtgtgaagagaacaaaactgaatatgctcttaattgaaaaccattcacccacaggccttgactttcacactttgaagtgctaaagtaatagcgtgcagaatattccgtgcggcagcactgtctgctttgcctgctgccgccgctgttataataaggagaaaaacaatggctgaaaaaaattccagaagaaacgagacgacggatgcactgtttgacgctatcctcagtctggagagccgggaagagtgctacgccttttttgaggatctgtgcactgtaaaggagatctcggatatggcgcagcgcctgcaggccgcaaagctgctgctggacggtgccacctatgagcagatcgtcaaggcggtggagattagcaccgccaccattagccgcatcaaccgctgcatccagtacggttccggcggctaccgcgacaccatcgagaaggtgcgcgcacaggcggaaaagcagtaacagccgtacccgccgcggcataggatagggcacacgaccggaaaggaaggttttgccctatgatgatcgataccccctgtgtccgttctcagtgcccggagatgcccaaggtcagcttggatcaggctgttgtggacctgatggaaagcattgccttgcaggaaacggcgctcagccacattttgtgtgcggaaagccggaagatgcagaaggccatggatctggatggcctggatctttgcaagctgctggaggtgaacgactccgccaccaatatggtgcacgccgtcgcaaaccttgaactggtgctcaaggataagctggagttcgtttccaacaacctctatgtcccgggggacagcggctgcccatcacctgcgcagtaatgttttttgcgtgggacgatctttactgcaatctaacccgtgaaaatgcaatgccgggcagcccgcaggctgcccgacattgctctgaatcgttctgccgcaagggaggctgctgcacaaaacagggtgcagcagcctccctttttatgaaaatcctgcataagagacagaaaaatcttttgttggaattgctgatgtatcaaatctgtgctatactattggatgtatcaccatgaaagcgaggaataaaacattgctgcattatgatgcgatcctatttgatgtggacgggacgctgatcgattcggcccccggtatcattcatacattgcaagaggttttctgcaccatgggtgtggatgtatccggcatcaacctgcgccggtatctgggtccgcccctgcgcaaaagcttcggtgagcacttcaccgacccggcgctgatcgaaaaagctaccgacctttaccgcacgagctatgcggtgaagggcagccacgagtgtgctgtgttcccgggcgttctgcagatgctgcaaaccctgaagcaggctggttttattttgtgcaccgccacctccaagcccaccaaggtggtcacccctattttggaggagcagggtctggcgcagtattttgattttatcggcggtgcctccatggacgagagccgggacaccaagaccgaggtcgtgcgttatgtgctcagtcagcctgctttgctgggcaagcgggtgctgatggtgggtgaccgcaacgatgatatgcggggcgctgccgactgtggtctggatgctgccggtgtgttgtacggctacggcagccgggaagagctggaagctttccatccggtgctgctggccgaaagctgtgccgaccttaccgaccggctgctggcagcccgggtatgacaggaagtttcattccttcggaaggagaatggatagaatatgagaagcaataatcaacaggagaaccagacgctgaccccgatgcagaagcaggcggtgctggtgtgcatcgtgtgtgcactggcggcgctgctgaccatcggtatcactcttaccatgctcaagcggggcaagaacccgacggagcagccgggggattcttccattattacccccgcgcccgctccggaaggggaggaagatatctccgaccactaccagatcaacgagacttccagcgcactgctcaccgggactgctgatgctggtgacgcctatcaggagcagaccctttttatcggcgattccaacacggtgcgtttgtacgccaacggtctgatctcgttgcagcagttctgcgccaaagaaggcattggcaccagtgccgccctgaacgagggcatcgttacttttaagcgggacgataaccgctacaccatcgcgcaggcggtggccaaaatgaagccccgccgggtagtcatcatgctgggcaccaacgacaacggcatgaataccgaggactttatcagcaactacaccgcgctggtacaggccattcaggccagctatccttataccgatatcatcgtcaacacggtgccgccggtcccgtccaaccactccaactaccccaacatggaccagacccgtattgatgatttcaacatggcgctgctgaccatgtgcgagcagctgggcgtcaagttcctcaactctgccgaggcactgaaggacgccaacggctacggcaatgtcgattactaccagagcggggatatccacctcaagcccgcaggcctgaaggtgctgctgaagtatctgcgcacccacgcctacgagaccgaggatcgccgcccggataccaataatatccccacccgtgccgagtataccgccaaccccagctctgcggtggaggcacccagcagctcggaggcggtctcctcctctgttgttgaggaaaaaacggagtatcaggcggactatcgtgtggacaaagccggcggcggctccctgacctgcggcgacgagagcggcaagtctcttaccgtcaaggtgaccagcgccgcccagagcgttaaggtgaccgctgtgccggaggacggctatgtgttcgtcaagtggagcgatggcgtgaccaagcgcacccgcaccgataccaattttgaccagaacgtggatgtgaccgctgtgtttgcagcggcctctatccaggtcagcagcagcggtaaggctgggctgggggattcctatacctttaaagcgaccctcaagggcaagtatctggatgcttccagcatccgctggtatgtcaacggcaccgaggtaacacaggctgccggtaagaccaccgtaaagggcgaggtagacccctctatggtgggcggcaccttccgggtgtacgccaccgccagctataacgactgcaccgtcaccagcaacaagctggaacttacggtcagcggtggaacgtccggcagcaccagcagctccagcagttccagcagctccagcgcttcctctaaggaggataagcctgcttcttccaaggaagaaatgtcctcctctaaggaagaaaaaccggcctcttccaaggaagagaaaccggcttcctccaaggaggagaagcccgcttcttcctcctcgaacggtacttctgaaagcgctggcagctcctccaaggtggagaagcctgcctcttctgcggcatcttctaaggaagaaaagcctgcttcctctaaggaggaaaaaccggcaacctctaaagaggaaaagcccgcgtcctccaagaccgaagctagcgccagcaaggaagctgccaactaagggcacatttcctccttgcgccgcataggctggcgggagaggaaggtggagccttatgtactgggaagcaatgcgcacaccctccctgcccggggagaatgacgtgaccaacggcagcgtggattactacgataccgactgggaaaacgtggataacagcgcactggaggaagaaatgcagaaatgtggtctgacgccctgcgagggtaaaacaatgtgtccggacaacgccccggcacaaacagacctgtctgcgtatgagatcgtttctgaataatgggaagccagctctgccgggggtggggctggcttctccctgttgatacaccaaagtgggaaatgctgaaaagaaagtgagatactatggcaaaatattattgcatcctgttcgatgcggacaatacgctgctcaactttgacgcagcggaaaacaaggcgctggccgaaacgctggtgaactacggcatcgagccggacgccgagaccgtgcagacctaccgcaccatcaacgaggagctgtggcggcagctggaaaaaggccagatccgccgcgaaaagctgttcggcgagcggttcagccgctttttaaaggccatcgatgccgccggtgacggcgtggagatgaaccgcttctatctggagcagctctccacccacccggacttgatgagcgccgaggttttggacgtgctgcgggagctttccgaggtggcaacgctggctatcgtcagtaacggtgcccagatggtgcagacccgccgtctggcagaaagcggcgtgatgaactttatggaggacgtgttcatctctgagaaaatgggctgcgaaaagcccaatgcccgcatctttgatgcggctctgcgcgcactgggcgtggagaaccgggagcacgttctgatggtgggcgacagcctggccagcgatattcagggcggcagcaacgccgggctggatacctgctggtataaccccaaccacgccgagaaccccggcaaggtgatccccacctacgagatcgccagtctggaggaactgtatccgctggtgatggagcaggaggaactggccaacgttggcctgaagaaccgccgccaccagtgctgaaacttgaaaaaacggataacggaacaaaattatgctgatacatttggaaaaactgggtaagacctttggcgaaaaggtggtgctgcacgatgtgaccgccagtgtcgagcgggaagatcgcatcggcattgtgggacagaacggtgcaggcaagaccactctgctcaagattcttaccggcgaatatcaggactacgagggcgagttcagcgtgacccacggggtaacactgggctatctggagcagaacgcaaagctggacgccacgctggatatctacggcgagatgcgcgccacttttgccccggtgctggatgccatggcgcagatgcagatcttggaacgccgcatggctgcccagcccgataacgccgacctgctggcacagcacgatgccctgcaaaacatcgtggatgccgccgacggctacaacatggacgtgaatatcaaaaaggtgctgtccggcatgggttttgcacaggatacatggcaaaagaacattgcagtgctctccggcggtgagctgacgcggctgcgcctggcaaagctgctgctggaaaagcccgatgtcctcattctggacgagcccaccaaccacttggactttgccactatggaatggctggaaaactacctcaagggctactccggcgcagtgctggtggtcagccacgaccgctatttcctcgataatgtctgtacaaagatctgggaggtgtccttccagaccatgaccacctacaagggcaacttctcggcttatctgccccagaaggaagccgccgatgccctgcgccagaagcagcacgatgccgacgtagcactggctgaaaagctgcaggactatgtggaccgcaaccttgtgcgcgcctccactaccaaaatggcgcagagccgccgcaggcagctggaaaagctggagatcaccgaggcacccaaggacgagaccaaccagctgaagttccgctttgaatatgacgtagaaccgtggaatgagctggtgatgctgaaaaatctcagcatcaagatcggggagcgtaccctgctggaaccctttacctatacggtctgccgcgggcagcggcttatcattgccggccccaacggtgcgggcaaatccaccctgatgcaggtgctggacggcaagcgccgcccctccggcggcatggtgcggctgggcaccggagcacgtcccagcatctttgcccagcagcagaaccgtctgggacagggcagggtcattgacgtcatctggaacaagtacccccgcatgaccgagctggaagtgcgcagccaccttgcaaagctgggcttccggggcgatacggtgttcaaaccctgcgaagcattgtccggcggcgagctggcgcgtctgcgctttgcggagatcgtgctggaacggccgaacctgctgtttctggacgagcctaccaaccacttggacatctatacccgcgaaaatctgaccgaagcactgatggcctacaccggcaccctgctgctggtcacccacgaccgtcacctgatgaacagtctggcctgtcccatcctctatcttgaggacggcaaggctgtgctctaccccagctacgatgccctgatgggacgtgctgccccggtgcaggccgcccagaaagctgccgagcctgccaagaccggctacggcaaggagcagcgccgccgccgcgccgagctgcgcgccaagatcaaggcctgtgaggacgagatggaggcctgcggtgcacgcgaggtggagctggacaacgagatcaactccccggaggtgtacaacgaccccgacctgctgcgccagaaaagcgatgagctgagcgacctgcgcttccatcaggaagagctttttgccgcatgggaagccgctatggaagagcaggaagcctacgagcagacgcagcagcccgaagaataaaggagcgtatcctctatgcctaaaaatcaccgcaactatcaaaaaacacggcacatcgccctgtccggtctgctgtttgcgctggccatggcgctttccttcatcgagggaacgctggttatcccggggcttttgccgggcatgaagctggggcttgccaacatcgtggtcatgtacgccttgttcttcatgggaccccggcaggcactggtgctggatatactcaaggcgctgttcgtctttctggtgtctggctttacggcgggcttcctctcgctgtgcggcgggcttttgtcccttgcggtgatgtgggtgctgtactattttctgccggtgcggcccacatggttcatcctgtcggtctgcggcgcactggcgcataacgtggggcagctgctgggcgcgggggtcatcatctcctcgtccttgtcgctgtactacgcgccggtcatgctggtgctggggcttgtcatgggtgcgctcacctcggtcaccctgcgggcgctgctgcccgcgctgggcaaaatgggcttcaacacccacgaaaaccgccccgaatgaccgaccatttcggcagggcagttgcattttggccggaaatctgtataataaggaaacaactgtatttttatcaaaaagaccccaaaggatagagctgccgcagcatgggaacttgagcggcagtcgggaggtgtttgtatatgtctgaaaaagttaccatcaaggtcgagcggaaggagctccatctgcccaccatcgcactgcgcgggctggtggtgttccccaacaaccttgttcattttgaagtcgggcgggaaaagagcattgccgccgtggagtgggccatggccaacaactccaacgtatttctggtagcccagaaagagatggagaccagcgagcccacccagcaggacctgtacacctacggcgtagtagctgaggtcaagcaggtgctgcgcgtgtcggacgaactggtcaaggtgctggtagagggtaagtaccgcgccaagttgaccgagctggataccaccggcgattttctgctgtctgccgtgcgctctgctccggtacgtgctgcaaagcccgaagaggctgtggagaccgaggcactgctccgcgccctcaagaccggctttgacgagtatctgggcatgaacccgcgccttgccaaggacgtggtgttcaccatcgtttccagcgatgaccccatgttcctcaccgagtatatgccggcaaacctcttgttccgctacgaggacaagcaggccgtgatgaacgagaacaccctcaacggccgtctgcagcgccttgtggagatgctgcgccgcgaatgccaggtgatgaagatcgaaaaggagatcgcggaaaaggtcaacgagtccatggacaagaaccagcgcgattactacctgcacgagcagctgcacattatcaacgacgaactgggcgagggggacgatacccacgccgaggccgatgattaccgccgtaagatccgggagctgcaccttgccgaggacagcgagaaaaagctgctcaaggaggtagaccgcctgtcccggatgcagagcagcaatcaggaagccacggtcatccgtacctatctggatacctgtctggatctgccgtggaacaccatgaccgtggatgatctggatatccaccgcgcccagcagattttggatcgggaccactacggcctgaaaaaggtcaaggaccgcattctggaaacgcttgccgtgcgcaagctggcaccggatgtgaaggcacaaatcatctgcttggtcggccctccgggcgttggcaagaccagtattgcgcgctccatcgccgaaagccttggccgcaagtatgtgcgtatcagccttggcggcgtgcgggacgaagccgagatccgcggtcatcgccgcacctacatcggtgctatgcccggcaagatcatcagcgccatgatcaccgccaagtcctccaaccccttgatgctgctggacgagatcgacaagctggcaggggacttccggggcgacccggcggcagctctgctggaggcgctggacccggagcagaacagcaccttcaacgatcatttcattgatatcccgtttgatctgagccatgtgctctttattaccaccgcgaacgacttgggcagcattcccggcccgttgcgggaccgcatggacgtcatcgagctgccaagctacacccgcgtggaaaagtataacattgcccgcaagcacttgctgcccaagcagctcaaggcctgcggcctgaccggcaaggtcaccatgaaccagagcgcactctacggcatcatcgacggctacacccgcgaggccggtgtgcgtaatctggagcgtaccatcaccagcgtgctgcgcaagtgcgcccgcaagatcgccgccggcgaggtggaaagcgtggcggtgaccgccaccatgctggaggaactgctgggcccccgcatcgtcaagccggacttcctcaaccgcactaacgccgttggcatcgccaacggtctggcatggaccagcgtaggcggcgagaccctgcccattgaggtgcaggtcatggacaacggcaccggcaagatcaccgttaccggctctctgggcgatgtgatgaaggagagcgcacagttggcagtcacttgggtgcgcgtccacgccgaggaatacggcatcgaccccgagcggctgaagaagtgcgacctgcacatccacgcccccgagggtgccgtgcccaaggatggcccttctgcgggcgtcaccctgaccacggcactggtatcctgcctgtccggcgttccggtgcgcggcgatgtggccatgaccggcgagatcaccctgcacggcaatgtgctgcccatcggcggtctgcgggaaaagagcatggctgcctaccgtgagggtatgaagaccgtgctcatccccaaggataacgagcctgatctttacgacgtggacgaggaggtcaagaagaatctgaccttcctgcccatgcagaacctttcgcaggtgctggctgccgccctgctcaagccgaaggcagcaaagagcaccgcaggccgccctcgcaccaaaaagtccaaagcaggggaaagccgcatccccgccgcgcctgagaagaaccagccgggcgctgtctgctgaaataccagaaaggaacacgccatgatcttcaataaagctgattttattgccagctatggcatttccagccagctgcccgagagcgaccgccctgaactgagcttttcggggcgctccaacgtgggcaaatccagcctgatcaacaagttgtgcagccgcaaaaatctggcgcgcgtgtccagtacgccgggcaaaacggctaccatcaacttctattcggtggacgactgctactttgtggacctgccgggctacggctatgccaaggtgagcaatgccgaccgcgagcgctgggatgacctcatcaacagctacttcgaggcgccccgccaccacaccctgctggtgcagctgctggactgccgccatgcccccagcgcagacgacttacagatgctgcgctacctgcactaccaccgcatcccctatgtggtggcactgaccaaggcggataaacttaaaaagagccagcttgccaaaacgcaggaggactttgaaaacatctgccgcccctacggttgccagaaggtggtgctgaccagcggcgaaaacggctacggcatcccggagctgcaggcggtgctcaacgccgcagtggctgcggaaaacgaagaggcggagtaacgccatggcttacaacgaatttgcctatttttacgatgaattcaacggcgaggcggactacgacgccctgtacagccagatccatgcaaagctggaagcccacggcatccatgacggcattgtggccgaccttggctgcggcaccggggaactgaccctgatgctgacgcaggcgggctacgatatgatcggcatagaccagtcggaggagatgctctgcgtggtgcgggataaggccgagcagctggggctttccggtcgtttgctgctgctacggcaggacctgctcaagctggatctctacggcaccatccgggcggcggtatctacctttgataccttcaaccacatcccggatctggataccgccattgccaacgcgggctttttcatggaaaagggcggggtgttcctgtttgatatgaacaccccctataagcaccagaaggttctgggcgataacgaattcacctttgaggaagaggatgccgcctgcgtgtggcacaaccactataacgccgccgaccgcaaggtggagatcacggtggacattgattatcacgagaccggcgagcatttccacgaggaattctgcgagtatacctatgatctggctaccatccgtgcggcgctggaaaagcacggttttgcgctggaaagcgtctgcgatggcgagactttcggcccgctgaccgaggaaagccagcgctacttcttctgcgcaacaaaacagtatacacaactggaggaataacctatggcaaacctgatccgcggcctgtccgagaatggcggtgtcgtgttctgcggtgtggattccaccgagatcgtccgtaaagcagaaaagcttcacaccacaagcgccacctgcagcgcggcactgggccgtctgctcacgggtgctaccctgatgggctccatgctcaaggatgaccgagaccgtatcaccctgcgtgtggcgggcggcggtcctgcgggcgtgctcatcgcctgcaccgacggcaccggcaacgtgaagggctgcattgacaatccgctggtggagctgcccgccaaagccaacggccacttggacgtgggcactgccgtgggcaaggacggcgtgctgaccgtcatccgggacaaccgcctgcaaaaggagcccacggtcgggcaggtgccgctggtatccggcgagatcgctgaggatctgaccagctactatgcctacagcgagcaggtgcctaccgtgatggcgctgggcgtgctggtggacaaagacctgtccattctctgcgccggtggttttatggtacagctgctgcccggcgctaccgatgctgaaatcgaccagctggaaaagaacatcagtgccatgccctctgtcaccgagctgctccatgcgggcaagacccccgaggacatgatgcagctggcactggccggctttacccccaacgtgctggacgagcgcacggtgcagtaccaatgcgattgcagcgccgagcgcaccaaggagatgctgctcagccttggccgtgccgaacttgagcggatgcgggacgaggaccccaactgtgaggtggtgtgccacttctgccacagcaagtaccagtacgacctgaacgccctgcttgccgagtacgatgcacaggctgcacaggccgctgaagccgaacatcccgtgcaataaaaaaatccgcttttcaaaaggcggctgcgcagttatgtgcagccgccttttttgcttctgcgtttccgaagcaagttgcttttatagctgaagttttccctctcgacccctctcgtgaaaagacaggtctggaaaatccgcagattttccagacctgtaaataaacaataatctttccgctgaacatggtcagagcaaagcggagaccattccaaatcgtccgccttttgctatgtgcagatatctgccgccacagtatacacggcattgtaatgcagggtctcctcctgcacggtacattcctcccggcgggcgaggatctcggcatccgggaaagcatcgtgcagcgcccgcagcccttgcagccgcgccagcgtaagcgcctgcacctcggtgtggtacagcgtttcctgctgctgcccgtaataggtggtctcctccaccgcgcagggcaggggcagaccaaaaacctctaattgcagatgccgggtgcagcacagtccatccctgtcgggtgcggagggcgaaagcgcggaagaatgtcctgcaaaaaacagccggtaatttgttttgttttcgccggtcagcagcgacatcgtctctgccagcggaacgctctggtctgtctgccactctaactgcgccaccactgtgcctgccgccggggcaaagatcaaggtgccgtcccgctcgctgcgtgccgtgccgatcaacccctgcccggcctctacggtctgcccgggggctaccagcatagtgccgctggcaagatttgtacgcagcaccgttccattgcactttgcccgcagcccgtgcagggtgcctgcggcgatctcaggccgtgcacgggcaggggcggcctccaccacaagccgtcctttttcaaaattcaggcttgcccacgagaactcgccgctttccagcagggagtactctccggtgcgcagcagctcctcggttacggcagtgccgggctgcaagccgcagctgcgcagcaccgcacccgcccgcgcccgctgtccggtggtcaggctgccgtagtccacagcccataccagcccttgcagccagagcagtaccagcccccaagcgacaagccctacccaaagccccttgcgccgcagcagcggacgcagcaaaaaataaagccccatccgtttttctacccgcagccgcacccgcctgtgccgggcaagtgcggccagccgtcggtactgccatgctgcacagtggccgtaaaagccgccgggcagggaaaaaataccgtataaatgcagcccttgtccggcggcatcggtcaaaagtgcctcggggctgccgttccgggcggtaaagcgcacccccgcccaaaggcttgcagcttccatgatggcctcctattcatcggaaaaatcggtgcgcaaaaactgcccctgtactgtcagccgggcggcggtcagggtgcagatgcgcagtccgctgccgtataccgtgaatcgtcctttcgccagccgcagacacagcctgttttcatcaaagaacaacaccgtgcaaaaatgctcgatctccatccggtcgccgctcaggtatacggcagggcggctgtaaaacccgggcggcggctgtcggaacagcccgcgcagccagtcgcccggggtgcgccggtcgtggtgtgctctggccatcgttgtccctcccgtcccgcgctttgtacattgcacagcccatgcttccatatatatggagggggagggcgtgcttatgagtaaaagctgcaaaccgctgcatccggggctttttttgctgggtgcagctacggcggcactggtgtttgccgcgccgcagacctgtgcggaagccttgcggcagggtcttgcgctctgcggcgggccgctgctggtgtcgctgtttccgtttctggtggtgtcggcgcttatcatgcgtagcggcgcgggcgaggtgttgggtgtgctgctctggccggtggtacgctgtatcggcctgcgcagccgcagcgcgggcagtgtgctgctcatcggccttgtgggcggctttgcccctgctgccgctgccactgccgaggcagtccgcagcagggaactgacctcgcaggaggcttcggctctgctgcccgcctgcatctgctccgggccatcctttgttattctgacggtcggggagcagctgctgggcagccgtacggcgggggtgtgtctgtttgccgcacaggtactggcaggctggctgacagctgcgctgctctgccgtgttcgcggcataccggagcctttgcccgcgccgcccgctgccgcgcaaactgaaccgccgccggcgctcgacactatccttgcgcaagcagcggtgacctacctgaaattgtgcggctttgtgctgtattttcgcctgttggcggcaggctgcgggctgctgctgcccgcggcgcttgcaccctttccggccatgctgctggaagtatgctccggctgcgactacgccgcccgcaccggtttgtgggcaagcgggctgtgctgcgccgcactcagcgtgcagggcacttcggtgctgctgcaagtgcgcaccctctgcccgccggaggtctcgttcaaacccttattatggggcagagtgctgcacctgccgctttcgctggcgctgttttatctgggcttaccgcagagcgctgtggaaagcttcaatactttgtgcgcccgtgtagtgcccatgcgtcgcgtgccgacagattgtgccctgctggtgttcgcggtgtgctgcatcacggcctgcgaggcctgccgcctgaccgaaaaaaggcacaaaacgcagctccggcaaacaaaaaccgctctgcggcttgcaaaccgccgcaaaatgtggtaacataactcttggttatcataataccaaacgcagcgacggagagagtaggcgctgtctgcacggcaaagagagaagcttcaccggctgaaagggcttccatgtgcggcaggggctgaagttcgctcccgagcggtctgcgcgaacgatgcggacgcatctattagcacaggacggttgcgccccgttacggcgtttgagcgccgtctgccctagtgcagacggaaaccgggtggtaccgcggagcggaaatagtcacagcttcgtcccttttgcctgagcagtcgggcaggggacggagcttttttgttgtattccgctccatgaacacaaagaataaaggagagaaaatccatgcaagcaatgatcgatgagctggccaagcaggccgctgaaagccttggtcaggtgtccagcaaggagacgctggcttccttctggcaggaatacctcagcaaaaacggcaagatccctgccctgatgaagaatctgcgcaccgttgcgccggaagagcgccccgccatgggcaagatcatcaacgaactcaagcagaaggtgcaggcagactacgatgcagccgccgagaccgtgaagcaggcagaacttgctgcccgcaacgccgccgagacggtggatatcaccctgcctgccaagacccgccccgtgggcggtctgcacccgctgacgctggtcgccaaccagatcatcgacgtgttctccggcatgggctttgccgtggcagatgccccggagatcgaggatgacgaccacaacttcacccgcctgaacgtgcccaaggatcaccccgcccgcgatatgcaggataccttctatctgtccgatgagttcctgctgcgcacccagacctccggtggtcagatccgcaccatggacagccagaagccgcccatcaaggtgctgatccccggccgcgtgttccgctctgactcggacgctacccacagccccatgttccaccagatggaaggtctggttgtggataagggcatcacgctgggcgacctgcagggtgcgctgaacaccttcgtgcagaaactgttcggtgccgacacccgcacccgtctgcgtccctcctacttcccgttcaccgagcccagcgtggaggtggacgtaagctgcttcgagtgccacggcaagggctgccccctgtgcaagcacaccggctggatcgaggttctgggcggcggcgttgttaaccgcaaggtgctggaaaactgcaacatcgatccggatgagtactccggctttgccttcggcatcggcatcgagcgtatcgccatgctgaagtacggcatcaacaacattggtctgatgttcgagaacaatctgcagttcctcaagcagttccacgaataagaggggagagaacaaacaatgaaagtacctttcagttggttaaaagaattcgttgatatcgatgtcaccgcacaggagttggaggagaagctgttctcctgcggcttcgaggtggaagagctcatcccgctggatgccggcatcagcaaggtggtcgtcggcaagatcgtggagatggaaaagcaggagggcacccacctgaccaagtgtgtggtggactgcggcgcttacggccacgagatccgcatcagcaccggtgccgccaacatgaagctgggcgattgcgtgcccaccgcactggatggttccaccctgcccggcggcatcaccatcaaggcccgcaagatgcagggcgtggagtccaacggtatgctgtgctccggcgcagagctgggtctgaacgatgatctgttcccgggctctgaggtctacggtctgctcattctgcccgaggattctgtccccggcaccgacatcgcccccgtggtgggtctggacgactacatctttgatatctccatcaccgccaaccgcccggactgccagtccgttctgggcattgcccgcgaggtggctgcggttctaggcaagcccctgcatatgcccgccatggattacaaggccgtctgcgagccggacgcgcccatcaccgtcaaggtggaggcaccggagctgtgcccccgctatatggcacactatgtccgcaacatccgcatgggcgagtctccccgttggatgaagcgtcatctggcgctgtgcggcctgcgctctatcagcaacgtggtggatatcaccaaccacaccctgctggagatgggtcagcccatgcacgcctttgacctgaacaaggtcgccggccgcaccattgatgtgcgccgcgcccacgagggcgaaaagatcgtcacgctggacgagaaggagttcaccctcaaccccaacaatctggtcatctgtgatgccgaaaagccggtggcactggccggtatcatgggcggcgcaaattccggcatggacgataacaccaccagcctgctgttcgagtgcgctacttttgcccgcgacagcgtgcgtaagaccagccgtgcactgggtcagaacagcgattcctctgcccgctacgaaaagggcgtggaccgttattctccgcagctgggtctggcacgcgctctgcacctgatccagcagctggattgcggtgatatcaccacgctagaatatgacctgagcgatggccgtccgctggagcgcaagcacatcgtcaccaccccggcaaagatctgcggcgtgctgggcatcaccgtgcccgaccagaccatgatcgacatcctgcagcgtctggagttcaccgtggacgtgcaggccgatggcagctgggacgtgtccgcacccctgtaccgcgatgacgtggaaggcttcccggatctggccgaggaggtcatccgtgagtacggctacgaccatatcgtgcccaccttcctgaacactgcctccgttaccaacggcggcttgaactacgaccagaagcagcagctcaagaccaaacgcctgctggctgcacagggcttctacgaggcctccacgctggctttctactccaacgccgagctggatatgctgcatatccctgccgaggacgaagcccgcaaggctattcgcatcctgaaccccatcagcgagaacctgtccatcatgcgcaccctgctgaccccctccatgctgaacgtcatcgtggacaacctgaaaaagggcaacgccgagggtcgcctgttcgagatggcaccggtctatctggccaaggaactgcccatcaatgagcacccccacgagcgtcagaccctctgcatcggcgccttcggccccgaggaggacttcttcaccgtcaagggcgcactggaagcactggcagccggctttggtctgacctttgattaccagcgcgagaccgccgcatggctgcaccccggcatcagcgccgccgtgtactgcaacggtaagcgtctgggcgtgttcggcaagcttgccaacgagatcaacgcagagctggagatcgccaaggagcagaaggacagccagaacatctatctgggcgagctggactatgaggctctgatgtcctgcgtagagggcgagctgcgctataagcccctcagcccctatgcacccgtcaagcgcgatctggctttggtctgcggcgaggctgtatcctgcggcgagatcgaggagaccatccgcaaggccagcccgctggtcagcgaggtcaagctgttcgatatctatcgcggcgctaaccttggcgatggcaaaaagagcatggcctttagcctgtccctgtctgatcccaagaaggaagtctctgctgaggaagtggagcgcgtggtcaaaaagatcctcggcaacctgaagttcaagctgggtatcgaaatccgttaaaagcatattatataagtaattatatatagaacaaaggccgtctgtgcaatgcatggacggcctttttacatggagaagagggggtgagtacaatataagtgaagcaaactcaattttctttcaaaaaagatgtcaaaaagtgttgacaactgccccggggtgtggtattatacttgagcgccaagcgctgagacaaaagaatgacttctgaaagctcagcaggaagcccttgaaaagaaccaatagacgctgaaaaacaccagttgacactgagatgtacgaaacgctccaagttcgtaaaacttcaaaagcttctcaaaaaagtgcttgacaaaaaaccacttctgtggtaaaataatcaagtcgtcagccgcaaggctgcggcgcacaggaccttgaaaattgaacaatatcgaaagaacttgtaacggaacctattttcgtgttggaaaaacacggtaaacaattccaaacaaagtaattcacacaggacgcaagcgattgcgtgctgagcgaaacaagatttaacacttttaagtgataaatatcatttataaagaagaagtcgaagcacaaaaaagctagcgctgcgccagtcggcgctatcgctttaacgcttttttcgcttctccatccatagcccctcagtcgctgcgcgacagctccccccgggggagcgagcgagcgcccgcagcgctgcgctttcgcagaaaacggcgctgcaaatgccgtttccctctacgacccctcccgtgaaaatagcgtttggagcgctccgcagagcttgtcggggcaaagcccctccatctgctaacgcagaccgctctgccgcttaaaagccccactggggctttcatactgatttgtataaaagtcactcactttgtgataatagaacgtccattgaaacaatgcaggatagtatcagcataccatcttacagtagacactaatggtgctcaaattgaccagtcttggctatttgaaaaggatgacctgacatatatagatattgccaaaacttttgagcagacatattttgtcactgattatgctggtggttctggtgatagcggtgcactcaatgaactcacgatagcttttggtgaaacaatggacggaatgccagacattcgcataacggtttctgaaaatggctacattcaaatcaatggtaaaagagcatatccgctttctcttaaatatgcaggcaagaggctttacgtacatcttttggggtgcttacaggatggagtccaatgagaaggcattcatgctcatgcggcagttcggcttccatgtggacggacatgagtgcatcgaggtgaaggagggtgacaccttctccttcggcaggcacaccgtcacctttgtgggcgcgcctatggttcactggccggaggccatggtgacccttgacgtcaccgacggcgtcctcttttccgccgacgccttcgcaaagaaattggaaaaaagatgtcaaaaagtgttgacaagagccccggggtgtggtattatacttgagcgccaagcgctgagacaaaagaatgacttctcaaagctcagcaggaagcccttgaaaagaaccaatagacgctgaaaaacaccagttgacactgagatgtgcgaagcgctccaagttcataaaacttcaaaagcttctcaaaaaagtgcttgacaatttatcacgaaagtgataaaataagtaagctgtcagccgcaaggctgcggcgcacaggaccttgaaaattgaacaatatcgaaagaacttgtaacggaacctattttcgtgttggaaaaaagtcaaaaccaccggctgagccggtggcttgagtaagccctagaagggcataatactagcaaagccccttaaggggccacgaatgggtctgtcaactgcattcctttctcgtggcaggcccctcaaggggcccttttatttacgccttagtttccttgctacccgtaaacgggtccacgaactccttaaggctcaactgatcggcaatctggtcctgttgcagttgatttttaatgtactcttggattttctttttgttctttcctaccgtatccacgaagtatcccctggcccagaaatgccgattgccatacttaaatggggaagatttggcgtgacttcggtcacgccttttcttttgcttccagttcatccagagggatgtaccccagcccatcgtacttgatatggatgtgctgcacccgctttccgctggacttatccggggcatccacatagatggccgacaccagttcacggagagcataaggggtgagttcttcaatatgaacgtacttgtgcgcgttctggacgaacttttcaatattctcgatctgctgttcctgtacttcaatttcctgctggatggagagaacttcctcttccagctgcttctgttcggcatcgtagctctgactcatcatgtcgaagcggtcatcgctaagctttccgttaacattgtcctcgtaaatcttcatgaacagccgtttgaggtctgcgatccgcttctcattccgggcaagctgcttcttcaggacagtcagcttttcggtgctttccacccgaagctgctcctccatgaccttgcggaagtagtcctcatgacggagaatgtagtccgtcacccgctgaacatggcttagcacacggccctccaaaacctttacccggatgaagtgtcccttgcacttgctcccgttcttcttgtgcagagagcaatcaaagaagtcttgactgaagtccctgtgattggacgaaccatattgcatcttggaaccgcagtcagcgcagtagaccataccggagaaaatgctgctcttgcctgtccgggtcatgcggtgacgctggctacgaatctcctgaaccttttcaaacacatcatcgtcaataatgcgctcatgtgtatccggaaagatagcctgattttccacgggattcagatgtctctttttatcccagatagagttagtataggtcttaaagttgactgtgcagccagtgtactcccggcgttccagaatcgaacttactgctcttttatcccagcgataagggtcttccggggcgggtgagttcgtactcaggccatggctcaacttataggcggtgggagtcagaactttgtccacccacagttggtttgcaatttgggtcgggccacggccttccatgcacatggagaagatgcgcttcacgattgcagccgcttctgaatcaacaagccaatgtttcgggttctccgggtctttcacatagccgtacggcacattgaccgtcagcggtactccacgttctcccttggccttctgaacagcccgaatcttgcggctggtatcgcgagcgtaaaactcgttgaaccagttcttaatgcccgcaaaatcgttgtttacgctgttcgggtcaatggtgtcgtagttgtcgttaatggcaatgtagcgaacgccatactggggaaaggtgaagttggtgtacagacctgtcaaggcagaattacgccccagtcgggacaggtctttcgtaataacgattcctacacgtcctgcttcgatctcggccagcatactctgaaagccgggacggtcatagttcgtgccggagtagccatcatccacaaagaataccgggttcgggaagtggttctttttggcgtattccagaaggatggccttctggttctcaatggacaggctttcgccgagccgtgcgtcctcttgcgacagccggcagtaaagtgcggtgatcttattcgttgctccagacattgttgtgtcctccttactctgtggagcaactgtcagtacaggattggttaccgggtcaagtatagcagaattgggcgcagttgtcattcgtctgcaccctcatcttcaaatttttgctgggcgttcttggcaacaatgcgctccagcttcttcaaaaaggattccttgccctcatagctgccggtcacggtgtaggtggtgtgaccgactttctccgtggtggtcagttccggaatccagaaagcggacaggttcttgacatggaggttgccgttctcgtccacataagagccgtgtttcttctgctcttcggtcaagggcttccgcttgaagtagatttcattttcggagatgctcacagtctcgctggtctgctctttcggggcatcgtcatacagctgggcgaaaaatgccagtgcatcttcgggtgagtcttcctccatgagttgctcgaaaactcgctgttcctctgccgagaggttgttccatgcggcttccaactcctgctcgttggctgcgttgacaaaggcttcgatctcttttttcatggtgcatcctcctttggctgcggaaagcgttttttcaaaaaatatgggttttcgtgagagcaagaatcgtcccgtggccacaaattttcaatactcgaaaatttcctgtcccctttgggactgtttcttgttggggcgtgcctgccccaaaccctgcttagtaaaagagcatatccgctttctcttaaatatgcaggcaagaggctttacgtacatcttttggggtgcttacaggatggagccgatctgcagcaataagaatgactaagcagaagttcctgtggaaggtaaattaaaaactacggaagctttacgctgaaagctgtaactttaagcagaccggaaagcttataatgagggtagaacagaaatatgaccaacgaagataccactgattttgacgagcacttcgctaaaatttcgtcctatattgtggacacattgcacggcattccacttgagatgaccgaggatgaaaaagaacaatttcgcatacaggttatttcaaatcagtatgcagaacggttgctagggtagatgccgaggttgtaggtcacagaggccaggacaatgtgactgtacttaaacgcctcggagatcagctgggagacatgagtggaggacacatcgtacatcgccaccttgctcatgcccttatcgcagagcgacgtcgccagcgcctgcgccgcgttctccgtgttgccgtacatagaggcgtagacgatgagcacgccctgggtctcaggggcatagcggctccatgtgtcgtacttttcaatgaaccagcccagatccttgcgccacacggggccgtggagcgggcagatgtacttgatctgatccaaaacgccgccggcctttttcagcaggagctggatgtgggggccgtacttgcccacgatgttggtgaggtaacggcgggcgtcgtccagccagtcccgctcgaagtccacctcgtcggcgaacagcttgccgtccaacgagccgaaggtgccgaaggcgtcggcggaaaagaggacgccgtcggtgacgtcaagggtcaccatggcctccggccagtgaaccataggcgcgccggagcaaaatcattgtctgaagcattgttgctgtcgatgctgttgttgattgcaaggaatcggacgtttttctgtgggaacagaacttccgtataaaaaccgacttgcagataatttcgtcctaagcggctcatatccttcacaataagcgtttcgacatttcctgcttctacctcttttattagagattgaaagccgggacgattgaaattcacacctgaaaagccatcatcgaaaggaggtagaacgaatgcctaaagaaccaaaaatcacagcactctatgagcgtttgtcaagagatgatgatcttgctggtgaatcgaattccatcaccaaccaaaagaaatatctggaagattacgcccaaaagaacggcttcaagaacatccgccattttactcgccttggtgggccgttacctcaccaactagctaatcggacgcgaggccatctcaaagcggattgctccttttccctctgctcgatgccgagccgtgggcttatgcggtattagcagtcgtttccaactgttgtccccctctttgaggcaggttcctcacgcgttactcaccccgttgcggggtgggtggagtccagaggtagggaggggggagtcggaacacccctccctgcctctggcccagcggagcgtcactgcacgctgctggcaggcaggaactttccccgcggagcgctgcgcattccaaatcgtccgccttccgggtgctcccctgaaaaaatatgcaaaaaatagtgcattccggtgcgttttgtgatatcttataaaagtgtgtaaccacaaataacacaactgcgtccataggacgcataaggaggaactgtatatgaagttggaaaccgggatctgcggcgagcagagcgtgcgcgtgagcgcagagaataccgcaaaaaccatgggcagcggcacgctggacgtgtttgctacccctgcactggtggcactggccgaaaagacctgctggcagagcgttgcccctgcgctggaggcaggcagcggcaccgtgggcaccaagctggagctggagcacaccgcacccacccctgtgggcatgaccgtgacctgccacagtgagctggtggccgtagagggccgcaagctgaccttcaaggtgacgcttgcggacgagaaaggccctgtgggcggcggcacccacgagcgctttatcatctttgaagaaaagtttgccgctaaggccgaggccaaaaagggctaaggatcgtccggttctgtttcgtccagccgcagcggcggcaagtctgcggccagcagctgctgctcggcgcgggtctgcgcgtcctgcaaaagctgcacggcctgcacgctggcgcggaacagttcaaagtacatggccttgtaatccggcacggtgcacaccccctttgcatttctgtgggtagtctgccccgcagcctgcgccccgatacgccggagcgtttttcacagaaaatgactgatacttgatatgaggagcttatgaaaaacaaaaacttatcctgggtgggggcgttgttcgtctttgccctgctgctgtggtgcacggcggtgacccccggcaaggtggccgaccccgccacctacacctgtgcggtgtacagcaccttcttttccctgctgccgccggtcattgccatcgtgctggcgctgaacaccaaggaggtgtacacctcgctattggtgggcattgcctccggtgcgctgctgtatgccaacggcaatcttgagctggcgctgaacactctgttcttcaacgaggacggcggcatgatcaccaagctgtcggactccggcaacgtgggcattctggcctttctggtgatgctgggcattctggtggcactgatgaacaaggcgggcggctcagcggccttcgggcgctgggcctccacccacatccacagccgggcgggcgcacagtttgccaccctgctgctgggcgtgatgatctttgtggacgactacttcaactgcctgaccgtgggctcggtgatgcgcccggtgaccgaccggcagaaagtgtcccgcgcgaagctggcctacctgatcgattccaccgctgcgcccatctgcatcattgcgccggtgtccagctgggcggctgcggtcacctccagcgtcccggcgggttccggcatcaacggctttaccatgttcttgcgtaccattccttataactattacgccgtcatgaccgtggtgatgagcctgttcctcatctttaccggggcagagttcggccccatgaagctgaacgaggacaacgccaaaaacggagacctgtttaccaccgccgaccgtccctatggcgacgatgtggacgatggtaatgatacaaacggccatgtcatcgacctgatcgcgccggtgctggtgctgatcgcggcctgtatcttcggcatggtgtacaccggcggcttctttgagggcgtggacttcatcaccgcctttgcggactgcaacgcctcggcgggtctggtgctgggcagcagcatcgctttgctgttcacctttgtattttaccgggtgcgcagcgtgatgacctttcaggactttgccgcctgcatccccgagggcttcaaggccatggtcagccccatgctgattttgtcccttgcatggacgctgtccggcatgaccggcctgctgggtgcaaagtattatgtggcaaacctgctgggcagctctgcggcggctttgcagtatctgctgccgttcatcatcttccttgtggcagtgttccttgcctttgccaccggcacttcctggggcaccttctccatcctgatccccatcgtctgtcaggccttcccggacggcgagatgctggtggtgtccattgccgcctgcctgtccggcgcggtgtgcggcgaccactgctcccccatctcggataccaccatcatggcctcggcgggcgcgcattgcagccatgtgaaccacgtttccacccagctgccctatgccattacggcggcggcctgctcggcggtgtgctacatcatcaccggccttgcacaggcagtgctgggcaaccgcgcaagccttgtcacctcgctggtgctgctggtggtagccatcgtgctggaactggcggtgctcagcgtcatccgcgcccgcacccgggcaaaaacttccggggatgctgcgtaaaattccgctatgcagcggggcattttcgtggtatactagccgtatagcaagaaaactaaagcattggaggcgcatgacccatgctggaaaaagcttttcaggacgtctacaccaaattcaagctgcatttttatcagaacgtgttccagcgctttgccacccgtgaggctaccctgaccacggtggaatccttctgcatggagggcatcatggccatgggcgagcccaccattgcggagttttcccgcatgatgcagatctccacccccaatgcggcgtacaagatcggcagtctggtgaaaaagggctatgtggaaaagatccagtccaccaccgaccggcgggagtaccatctgcgccccacccagaagtatatcgactactacaacatcagctactcttatctgcacaccgtagtggagcgtgcccggcagcgctttacccccgaggaatgcgccaagctggaacagatgcttaccatcgtgagcaccgagctgatgccggaactggacatactgaaaaaaggcgaggactaaaaacgataaaacggctgctgcacaaaaacgtgcagcagccgttttgcatatctcgttacagcaccataaacagtgtgccggcggtgatgagggcacagccgatgaggcttttggcggtaaagggctcgtgcagcaccacaaaggccagcgcaagggtgatgaccacgctgagcttatcaatgggcactaccttggacgctgcaccgatttgcaaagcgtggtagtagcacagccagcttgcgccggtggcaaggccggacagcaccagaaacagccagctgcggcgagagatgtccgcaatgccggtctgggtgccggtgaggaacaccatgccccagctcatcagcagcaccaccgccgtgcggatggcggtggcaagggtggagttgaccccctcgatgccgattttagccagaatcgaggtaagggcagcgaacaccgcagaccccagcgcgtaaacgaaccacatggcaaacgcctcctttttgccccagtatacgcttttgcgcggcggaacacaaggctgccaggaggaggacgatttggaatgcgctccgcgttttacgggttgcggcacccagcatccgcttcgtgccttgggcggcactcgcgtcttgctggccgctgccccaacaactcctccctgtttccgccgctggcggcggtcgtcatcgttgctgcgcatggtcagcggaaagaatatttataatttcggagcaccggagcgtctgcggacactccggtgctccattttcacgagaggggctgatgggttgaaaaattttcgcctttctgtacaaacgcactgaaaaattgtaggataagaatggaaaagacgtcactttcacgctttacaactttacctagataaagtaaaataagaacagaagcctttcattctatggtgcggaggatgccgcgccggatgtttttgtgtatagagacgccggaattgtgccggtgcagggaaagaaacaagggaaaggaaacgagggagcgaaatggagttcagtctggagcatttgcagccaaaggagcgcgcctcctttgcgctgcgcagcctgtacgagacggcaggctgccgcaagtaccacatgggacggttcgaggagtacagcctgtatcaggagaaccgcagctttctgtcgtcggagcaggtcatcacctttaccgatttggatggccgtctgctggcgctcaagccggatgtgaccctgtccatcgccaagacggcgcagcccgcgccgggcgagacgctgcggtactactaccacgagaacgtctaccgcccctctgccgaaagccacacctttaaagagatctcccagatgggtctggagatgctgggcgctgtgggcgaggctgaggtgcagcaggcggtgtgtctggcggcgcagtcgctggcggcgctgggcgcagagtgggtgctggaagtcagccacatgggctacctgttcggcctgttcgatgcgctgggcgtgccggaagccgcccgggcgcagctgctggaaaagctgcggcagaaaaacgcccacgagctgcgcgccgccgcgctggctgcggggctttccgaaacggcggcagacgctttgtgcggggtgctggagctttccggcgggtacgctgccaccctttccaaggcggcagcgctctgccgtaaccccgctatgactgccgctgtggcagagctgaccgccctagcgcccacgctgggacacgcgggcggcagcatccggttagacctgaccttagccggtgagatggaatactacaacggccttgtgtttcagggctatctcaaagccctgccccgcccgctgctgaagggcgggcggtacgatttactgctgcaaaagttcacccccggggcgggcgccatcggctttgcggtgtatctggatgagctggaccggctgaacgcgatgccgccggtgcagcatcaggacaccggcaaggtgatgctgaacgtggcgctgcccaaagggcggctgggcgacaaggtgtataatttgctggcgggcatcggctacggctgcccggaggactacaacgccacccgcaagctggtggtggagaacccggcagcgggcatccggtattttctggtcaagcccagcgacgtggccatctatgtggagcacggcgctgccgatgtgggcatcgtgggcaaggacatcctgaccgaggccgccgcagacgtgtacgagctgctggacaccggccttggccgctgccggatgtgcgtagccgccccggcgggctaccgggacgaccccagccgcccggtgcgggtggccaccaagttcgtcaacattgcaaagcgctactacgcctccatggggcgggatatcgatatcatcaagctgaacggctccattgagctggcccccatccttgggctttcggatgtcatcgtggacatcgtggagaccggcaccaccctgcgggagaacggcttacaagtggtcaccgagttcatgcccatctcggcgcggttcatcgccaacaaggccagctaccagttcaagcaccggcagatggacaccatgctggaaaagctgcgcgacaccttgcacaagcaggaggaagagaaatgatcaagctgtataattttgatgagctgaagccggaggaaattctgaaccgggacatccgcgccgagaagaatgtggaggacgtggtggacgccatcattgcggacgtgcgcgcccggggcgacgacgccctgaaggactacgccctgaaatttgacggcgcagcaatcgaaaatttacaggtgacgcaggccgagatcgacgaagcctttgctggcatggacgcctatttcctcgagaccctgcggcaggcggcggagaacatcgagcagttccaccgccagcaggtgcacaagaattttgtgatgaacgaccgccccggcatcgtactggggcagaaatacacccccattgaaaaggccggtgtatatgtgcccggcggcacggcggcgtacccttccaccgtgctcatggacgtcattcccgccaaggtggcgggggtgtccgagatcgtgatgaccacccccgccgggaaggacggcaaggtgaacccggtcattctggccgctgccgccaccgccggggtgaccaaaattttcaagaccggcggcgcacaggccgtggcggcgctggcctacggcacccagagcatcccggcggtggataagatcgtaggccccggcaacatctacgttgccaccgccaagcgcaaggtgttcggcaaggtgggcattgatatgatcgcgggccccagcgaaattctggtgctggcagacggcagctgcaaccccgcgtgggtagcggcagacctgttaagtcaggccgagcacgataagctggcaagcccggtgcttgtcaccgacagtgcagcccttgccaaggcggtacaggcggagctggaagtacagatcccgcagctgccccgcgccgccattgcccgcgccagcgtggacgacaacggtaagatcatcctctgcaccgacctgcacaaggccatcgaggcctgcaacatcatcgcgccggagcacttggaggtctgcgtggaggaccccttcggggtgctgaacgagatccgcaacgcgggcagcatcttccttggccgcaacgtgccggaggcactgggcgattactttgcgggccccaaccacaccctgcccaccagcggcaccgcacgcttttccagcccgctgggcgtggacgatttcgtcaagaagtccagcttcatctactacacccgggacgcgctggaagccgttgcgccccgcattgcagactttgccgagcgcgagggtctgcacgcccacgcccgcagtgtaaccatacggtatgagaaataaataaggaagcgccctcatcaggctcagccggatgagggtgcatcgccgacagaacccaaagaggaaaccattatgagccgttttctttcccctgtcctgtccgctgtcaccccctacacgcccggggagcagccgcaggatcagcagtacatcaaactgaataccaacgaaagcccctatctgccatcgccccgggtggtggcagccgtaagcgaagccgaggtggaaaagctgcgcctttactccgaccccgcctgtgcccagctgctgcgcacggcggcggcgcatttcggcttgcagccttcccaggtcatgcccggcaacggcagcgacgagaacctgttctttgcgctgcgcgccttctgtgacgagagccatccgctggcctttgcggatatcacctacggctgctacggcgtgtggtgcggtctgctgcacatccccacccacatcattccgttaaaagaggacttcacccttgaccccgccgattaccacggcctgcacgagaccatcgtcattgcaaaccccaacgcccccaccggactgtgcctgccccgggaggccatcgagggcattttgcgatcgaacccggacagcgtggtcattgtggacgaagcctatgtggactttggcggcgagagctgcgtgcccctgatcgaccaatacgacaacctgctggtggtgcagaccttctccaaatcccggcagctggcgggtgcgcggctggggcttgccatgggcaacgcggcgctgatcgccgatttgaaccgggtcaagttcagcctgaacccctacaacatcaaccgtctgactttgaaggccgggcaggctgcgctggaggataccgcctactttgaaaagacccgcgccgccattatggacacccgcgcatggacgatgcagcagctgaccgaccggggctttaccgtgctggacagccgcgcaaactttgtatttgccagcacaaaacggataagcggttgcaaactatacaaagagttaaagaaaaacggcattctggtgcggcattttgatgcgccgcgcattgaaaactggctgcgcatcaccatcggcacgccagagcagatgcaggcgctgatggacgctgtggacaaaatactggaggtgtgacaatggcagagcgcatggtaacgctggaacgcaacaccaacgagacccagatcgagctgacccttgatctggacggcaccggccgctacgagatcgacaccgggtgcggctttctgaaccacatgctggagctgtttgcccggcacggacggtttgatctggtgctcacctgccacggcgatgtacaggtggactaccaccacaccaccgaggacgtgggcattgcgctgggacaggcctttgcccgggcgctgggcgagatgcgcggcatctgccgctacggcagcttttacctgcccatggacgaggcactggtgctgtgcgcggtagatctttccgggcgctgcaccctgaactgggacatccgctgccagaccgaaaaggtgggcgattttgacgtggagtgcgccaaggagttctggtacggctttgcccgcagcgtgcccgccaccgtccattttgtgcagtttgcgggcgagaacacccaccacattctggaagcctgcttcaagggcgcgggccacgcgctggccgaagccgtgcgcatcgacgcggcacaccgggacgagatcccctccacgaaaggactgctggtatgattgccattcttgattacggggtaggcaacctgttcagcctgcgttccagcttgcagcagctggggctgcaggcggtggtcaccgctgacgccgctgtcctccgcgccgccgaccggcttattctgccgggggtgggcgcattcggggatgccatggcaaagcttaccgccaccggccttgtgccggtgctgaaggagcaggcggcgcagaagcccctgctgggcatctgccttgggatgcagctgctgtttgaaaaaagctacgagtacggcgagcacgccgggctgggctttatcaaaggcgaggtctgcccgctggggcccgacctcgcggacaaaagtctgaaagtaccacagatgggctggaacgctttgcacatcgtaaaggatgaccccctgttccgctacatccgcgagggcgagtatgtgtactacgtccacagctactacggcaaaaactgcgccgaaagcacccttgccgtcagtgattattccatcccggtcaccggcgcggtgcgggcggggcgggtgtacggcacccagttccacccggaaaaaagcggcgacaccggtctgcggattctcaaggcgttcagcgaattgtgagcgggctcgccctctctgtcaccgagcaaaacgattttaaatgccctccgctatcgggttgcggcacccagcatccgcatcgtgccttgggcggcacttgcgtcttgctggccgctgccccaacaactcctccctgcggcaccctgatgggtggcgaaagcggcaccagccacatgggaaacacctactattactacaagtgcggcaacgccaagcgccacggcaaggcgcactgtgacctgaaagccatccgcaaggagcctctggagcggttcgtggtggacaccgccattaaggtgatttttaacgatgaaatcatcgaacagctgatagatttggtcatggaagcccagcagcaggagaacacccggctgcctgttctgaaagagcagctccgggatacggagaaacggctcgcaaaccttctggaagccattgaacagggcatcctgaccccgaccaccaagcagcggttggacgagctggaagcccggaaagaagccctgaacaccagcattctggaagaagagctgaaaaagcccgtcctgacccgtgagtggattcggttctggcttgaaaaattccgcaagggtgacgtgggcagcacggaacaccagcggcagatccacggcacttacaaccccaagcacaatgaccgcagtttcaaccttgccaacagtgagcacatcgacccggaacgagccaagggcaacatctactgggactgcttccacggctttcgttcggctcttgacccacaagacccggacgatttggcggcaaccttctcggacgtagaacggcagttctacgaaacccactacacggcttttgtggaaagccagaacgagcgtaagtctcccagctgatctccgaggcgtttaagtacagtcacattgtcctggcctctgtgacctacaacctcggcatctaccctgccatgcatgacttcctcatggatatgaaggcactgaatctgcaaaaccgcacctttgccatcattgaaaacggctcatgggcggtgaagtccggtgacctcatgcagaaattcgtcaacaatgagcttaagaacatgacggtgctcaacgagcggctcagcctcgcctcgtccatgggcacggacaagcgcactgagctggaagcactggcggacgccattctggaatctatgaagtaactggcaggaaagccaaaaccaagacaacagacaacaaacagccccgccgcgtcggcagcagaaaaaccggctttcaaaaatagagcgggcaagcgtgatactgcgcttgcccgctctttgcccaaaaggacatgagaagtgaccggagaagatgagaggattgcacgccctttttgggcgcgtagtactgctgctcggcccgcacatcgatctgagacatacttaggatattcagccgcagcttttttgcggtcttttccccgtagccaaaggcaacgattgccgccacctctaacggggtggcgagagacagtgcctttttgattttgtcgctgtcggtgaaggtcatccagcaggtgtcaatgtccaactcagtcagcttgaggacagtagatattgttcgattttgagggccctgaaaaggggttactcaaaaccttatgtgggggtttagctcagctgggagagcacctgctttgcaagcagggggtcaagggttcgattcccttaatctccaccacatgggccaatagctcagctggctagagcacacgactgataatcgtgaggtcgatggttcgagtccattttggcccaccatgtgatgaaaatcagagttccgggagaccgggctttgaggaacatcaccaagacgtaccttgaaaactgaataataactgcgaaacaaagattatagtaagttcttttttaagaaatattacaatttcaacggagaccaacgccggatccgacgccggcggcacggagaccacggcgctggataagggggactactacctcctcaacggcggcaagatcttcattaccaacgcccctaaggcggacacctatgtggttttcgccgtcaccacgccggacatcggcacccggggcatctccgctttcatcgtggagaagggctggaagggctttgagttcggcgaccactatgacaagatgggtattcgctcctcctccacggcggagctggtcttcaacaacgtgaaggttcccaaggaaaacctattgggcaaggagggcgagggcttcaagattgccatgtccacgctggacggcggacgcatcggcatcgccgcgcaggcgctgggcatcgcccagggcgcgtttgagcacgcgttgagctattccaaggagcgcgtccagttcggcaagcccatcgcggcccagcagagcatcgccttcaagctggcagatatggcaaccaagctgcgctgcgcccggttcctcatctactccgcggcggagctgaaggagcagcacgcgccttacggcatggagtccgccatggcgaagatgtacgcctcggacatcgcgctggaggtcaccaacgatgccttgcagatccacggcggcagcggctacctcaagggcatggaggtggaacgggcctaccgcgacgccaagatcaccaccctctacgagggcactaacgagatccagcgggtggtcatcgcctctcatctgttgggcaggctgggcaagagctccggcggcgagagccgttcggcggccaagaaacccgcgcccatcaccggcattcgcaaaaagaccatcttccgggagggggatgctgcccagcaggtggccgaccttgtggcggcgctgaagaaggatggtcacgacttctccgtgggcatccctatggatacgcccatcccgcaggcggagcgggtggtctccgcgggcaagggcatcggggagaaaaagaacatgaaactggtagagtcgctggccaaggccgtcggcgcggccatcggttcttcccgccctgtggcggagactctcaaatatctgccgctgaaccgctatgtgggtatgtccggtcagaagttcaccggcaatctgtacatcgcctgcggcatctccggcgcatcccagcaccttaagggcatcaaggacgcctccaccatcgtggccatcaataagaacggtaacgcgcctatcttcaagaactgcgactacggcatcgtgggcgatgtggaggagatcctgcccctgctcactgccgcgctggatagcggcgaaaagctgcccgcgccgcccatggtaaagatgaagcggcccacgccgccgaagcccgcccccatcggcgaccgctacgtctgcagcggctgcggctacgagtatgtgccggagttgggcgacgaggacggcgagatcgcgcccggtacgctctttgagcagcttcccgccgagtgggtgtgtcccgagtgcgcggagacgaaggatcaatttgtaaaggcttgaggccgtgaaggaggcaagataagatgtattgcgtgcgtaaagtaacgaacgacctctactgggtgggcgccaacgaccatcgcctggccctgtttgaaaactgctttcccattccccggggcgtaagctacaacgcctactgcctgctggatgaaaagacggtgctctttgacacggtggactggtctgcctgccgccagcttttggaaaatctggcgtatgtgctggatggccgcgagctggactacctgctggtcaaccatctggagccggatcacgccgcctgcatcgaggagatcctgctacgccatcccaaggtgaaactgatctccaatgagaaggcattcatgctcatgcggcagttcggcttccatgtggacggacatgagtgcatcgaggtgaaggagggtactcttggattttctttttgttctttcctaccgtatccacgaagtatcccctggcccagaaatgccgattgccatacttgtacttcagatttgcatgtctgtcgaaaatcatgagactgctctttcccttgagatatcccatgacataggaaatgctgtacttcggcgaaaaacttatcagcatatggatatggtcagggcaggcctccgcttcaatgatttcaatacctttttgttcgcacaactggcccgaagcagaaccaatcggaattgaaacgttgtcaaaaacgctatgatgagctttctgcccttattcgtagcctgtacgagaatcttatgtctggactgttgcccgaacgacagtacaagcagctgatggcacagtatgatagcgagcaggcagaattggaatcgcagatggaaacgatgaaatccgaaattgccgaagataaatcaagttctgctgatattcggcatttcatttcgctgattcgcaagtgcaaaagtccaacagaaatctccgattcaatgtttaacgaacttgtcgataaaatcgttgtttatgaagccgagggtacaggcaacgcccgcacacaaaaggttgatatttatttcaactatgtcggtcaagtcgatattgcttatgccgaggaagaacttgccgaactgaaagtgcagaaagagcaggaagaacggcagcgcatggaaaaacagcgcaaacgtgaaaaagcctatcgagaaaagcgaaaagcaaagaaaatcgctaaaaacggtggcgaaatcattaaaaccaaaacgtgtccgcactgtgggaaggtgtttgcacctacgagcaaccgacagattttctgttcaagagactgctggaatcaggcaagacaggagcaaaaggaagcggctagagaagccgagagaggaggtcattgctaccggcaacgtgcctgtgccgtatgcggtaactcctactggcctacacacagccagcaggaattttgttccgatgagtgcagaagaatcaaccacaacaagaaaaccttggaattctatcacaagaaaaaaggaaatccaaaacctgacccagaagcaaccccaacgccgaaaccaaaggaggataatgcagcatgactaccatgaaaaattccatccatgacaacgctaacggtctggactacacccttgtcaatgaccactatctgccgaatctgaccgtagtagccccgacagagcagcaccccaccgggcggtggggccgcttacataaaaggtatctgaaagaacatcatcccatccggtacaatcaactgctcctgtccggtgagttgggcggctatcttgccaagctggacaagcaagtcgaggaacagcttgcattgaccgtccggcagatgcgggacagtgcggttgggtgactcaagagaaagaaaaaagatacaacatatcgttgaaaattaaatttcaaaatcattaaaggagctattcaaatgaaacgaaatcagaatttcgaccataatcactctcaaaaagtgctttcctgccgctacaacatggacactaaccgagtggaagcccggtttgaggatggaaccactctttccatcgactgcatcgccattgaggacgaatacggcaacacccctgcgcagcgagcagaactggattggttactatataataagcctttggagtatgcccagcttgtgctgggtggtgagattgagcattatctctcgctcggctgtgaccacggtagactagaagactagcctttaattaaaatattcccaacagaccaacagccctctacttgcagtcgttgcaaatagagggctgttgtacattattgttcttttgcttcagaaccgaccttctttaaatctgaatgaccagcagttctctttgcataatatctgagttatgtgtaacaacaaatagcgtgcaaccaagctcttcaaaacgatcagttttcaaaggagaaactatccagtaaggttagtaaataatcgtttggaataccagccgtctcacttttttgagcattctcattgcggacataaagggcatagtctgttgcatggtgttggaacatggtatattgtgcaattgtacagccagcatgatcctgtattgtgtagatcgcaaagcattttcctgacttcgatgtgtaaagctttttggaaatgctgtaattctgtttaggaaatcttttcgtatacgttttctgagaaccgcacattccatccacatcataaaatgtgttggcgcaaagtgaaatacttacatttccgtccagccagtatcttgtatattccgtctccgtgactttggtggaggaattgaaaaagacattcatttgatctttttgggcaatgctatgctccatggtatccagcaaagcgttttccacaaaatgaacgccgaacagctgctcgatctgctcctgcgattctggtgtcatagagtagaaagttgctccggtgcgggctcgttccttcacggtttgtcgaaccgatttgtcaatttccgtattgcttataacctcatctatttcagagacatagcaaatctgtgtatcctccggcctatacgtaattgaactgctcatatctgcttcaagtgcatttgagacaggacttagaagaactgctacccccagtaacatagcaaaggagaaggttaaacttttcttcataagacactcctattcaaccgattcatagtaagatgaaatatggaacccgaattgaattcgattctagacgattgattcggggacgtccagctgatgctgtaaagtttttagatgctatttacgtttacgacagcaaatgccgttacaaaggtgtgtgtgattctttcagaacaatcaaatcttttgaacttcaccatctgaatgtacatgcgcgaaattggttaatgcgttaagttctgcatcggaatctccctttcatctcaaattccactctagctattatcaatgatatcaaagcacaagaacccgtcgaagtccacgattttgtatcaaaatagagaaaacttgtaacgaaatcggtgtggctgcaaacaatatgaccctcaacactgggcatccagctatggttttcatatttgaatcgtgcatcttattaatgcctttttctgcagtaaaaataagaaaggatggacggagtgccaatatacaatagtattgaccaaatcatgaccgctttcgatttattgggcagagaaaaaagaattgtaatacctaaaagtatagtaggaaaagttaattcatataaaagcatgtgtgcatatctccatgtttgacaatcgtctaatgtccatggtaaacgcaaaccaacatacttattgaatggaagctttttagagcaatttccaaagatagccataaaaccaaacacgagaatctctgaaagaaaaatttcctgcgaatcagatagcacaatgactcgcaacgcttttaatattatataactaacgataataaataaaagtagaataacgctaatacatattatagaaattgaataattgttttttctgtcactttcttccaaaattatatcattcttgtgcatcaacaaaaaagcaacacttattattgcaaaaaacagaccaaataacatacgaatgatattattgggaatcaataattctcctgcaattccgattaagcacaaaattcttacaaggaacagtttgtcgtgcttcatctttgctcacccctcaagcctagaatcatttcatagaatgtacttagccttaaatacacgaatagcttctcacggttgtaaatccgaaatagtaagctcgcatgataataaaatagtccttcaacacggtaatataaattatttagttctccatttccaccactttaccagcattacaataacggcaaccacgaaaacggctataaacagtaccaacgatatttcattcagaacaatattccgcttaaagaagaaaagcaccaccaaccgcactgcaagagcaactaacagcaaagctcctataattttactcatgattcttttcctttcgatgtttctttacggttcctaaactctcttgcaacatatgaatgatatgtaacaccataaccacccacagaagtataaaccatccgagaagtactatacgcaataagttttcttcattttagttcctcactgtacaacatagccaataagagcaacgatctttccattatcatacaaaagagctacttcgttgttgagttcaatcaaactttcgtaagctcccaattggcattcatctaaaatatctttattaactgcgtagtcgattttataaggagaaacatcttttccattgttacttaaatcgaataactcaaaaatttgatttgttggcagctcacttacctttgcatatgagaaaaaattctgtatctttttcatcagtatcgcttcacctcgataaaattctgcggcagaaatatatatcaatctatttatttttgatgctttttataacaacaaaaactattatgagaacgcaaatgcctccacttgataaacaaagtaccttatcttctgcccttagaacacccacagcacttctcatgttccaataatacaaatcataagacaagctcatgattgcaaatgtaaggaggccatagtatgctttcttcattggcaatcagtgtcctttcaatttttgcgtaaaaacttaatggcatagcgaatcagatactttacaagaactaccagtacgattcctacgattaccgctatcgaaataaccagtaaaagttccaatggtgaaaacttcatgcttatccttcccggttttgatattgtagaaacactgatactgatttcaatatcaatgtaccatagatttttccgaaagcaaggtctttggcaaaactggtcgttattgtggcaaaagtggtatatcaagccacttgtcaggcgcaaatgcacagtttataatagtgccagaaacattactttgtggaggacgacaaaatggcgaggtatcgaattgcagtctgcgatgatgaaccgtcagagcttgaagatattgttcaaagcgtcaagcgatatgatgtccatggcgattttgacattgagaattacacagacggtgcagtgcttttaagtgatttgcagctaaaaaagaacttcttcgatcttctgctacttgatatcgaaatgccttcaaacggatttcaaattgcgcaaaccttaacacagatggaaaagcatccgttggtgatctttgtcacaaagcggcatgaatacgctgtgcaggggtatggtattgcattccgttatctagtgaaaccacttgataaatcgctttttactgctgcaatggatgcagtcgtccaagaattggattccaaacactttaccgttgaatatgaaggagctacgctctcattggaaacatcagatatttattatctggaaagccatgggcataaagtcttgattcattgtaaaggtcaagacctcactctgcgaatgacgattccagaagccttagaacagttgccgaaaaggtgctttgcttcaccccataaaagctatcttgtcaacatggagcatattgtctatgccactggaacgacagttgttctgtccagcggaaatcaattgccaatcagtcggaggaagcgtcaggagttcaaccagagctttaacgcttatttgggaagatgatatattattttgttgaatttgccgggagctttgccaacattgcgttgctcgtacttttcgttggccgtttattccagaaaaaagatttgtatttgcgatggttctatctttatattgcgcttctaatggctgggcaatgtatattgagcctgtttcccacttgggtaatgccgcgaacgatttacctccttctgggagggtttcttcttgcgatgctgttttatgaagtacaattgtggcaagccatctttgcaagtgctgcattttttacgttgattgcagtggttgaagttcttgcaatgctccttatcgggctgcgcatcccagatacagagatcctaatgcaagcgggagcagccagactgatttatgtggtgttctcaaatctgatacagattccattggttgttttaatctcgcattttttcagtcgaaaagaaaatgttcttcgtattctttggctgctgccaatcatcgctatccaaattgctagtatcgcagtttgttatgtggtacagtaccatgcagcggatggaaattttccagactacctgattggctttatggcagtacttctcttaataaacatcctgattgttttctatgtggaagctctccgaaaaaatgagcaggaaaaattcagagcggaatttaacgagcagcaatatcgcttgcagatggagtattatcagcagctaaaggaacggcaggaagaaacaagagccctttggcacgacatcaaaaaatatattctggcaatgcaggcagttgcggaacgcgggaatcccgaagaacttcacaaaattgtacgagatgcaacggatgcctttgaacgttccaaaaatatttctacaattggaaatccagttgtggacgcactgttaaatcagtgtttacatacagcagaagaaaacggcatcaaagtaactctggacgtaacgattccagaagttctatctatatctccgttatctttaagcatcctgattggaaacacattcgacaatgcaattgaagcttgttctggcttgccgccagagcaacgaaagatccatttgcagctgcgcaaacagtatcgaagccttttctaccgccttgacaatccatacagtgatatctcgcgcagccttcgggttggcagccaccatggatatgggctgaaaaatgtaaaacgtgtggtacgggaaagcgatggcgatttttatgccgaaaagaagaatggaacttttaccgtgaaagttcgattgaactgcgaaaattaaatatgtttccaaagccaaatgatcagcctccatactgattgtttggctttttattttctgaaaaaggagcgtgatgccatgacccaaccgaaaaccgacattgcctacctccgcaacgaaaaagccaaagcagagcagaagctgcgctcttgccagaaccgggagaagatccttgaacgccagatgtcagagctgaaccggagagagcgtgtgcatcgtctttgtacccgtgccggaatgctggaaagctttctggtctgtccgggagaactgaccgatgatcaggtgatggaactgctgaaaatctcgttccgccagcctgaagtcgtgctggcacttgcaaagatggtgcatgatgttcacgaacgcagcaacgtccaaaaccctttagaataaagggcgcaattatacacctcgtcgtcacttgctgcgtatcggcgcaccaaattggaggagatgaaggatatccacctttacgaaacggtagtgtctctgcgtggtgcattgaaccaaaccaacgaagcgcagatggacgctctggtggctgagctctgcgcagaataagctgcaacaaaccgcagctattttcgtacagatgatggtcttactcatctgctttatgtcccaagggcagagtaccgtcacctcaggatgaggtcacaatgtggtgtgggacgagaccggagtcttgagaatacccaaacaaaggaaaggagctgacagatatggcagctatgaatatgaatcaggagcagtttaagcagttgatccgggaggaaaagcctgttttggtggatttctgggcgccctggtgcagctattgccggaggatcggccctgcgtatgagaagattggagaggaatacgcggacagccttgctgtcggcaagatcaatattgacgaggagccgcagctggcgggggccgaggggatcgaggacatcccaactctgatgctgtaccggaacggaaaggccgtggattccatcatcgcgcccggctcaaaggcagaaatcgaccgtttcattcaggaagccttggcgaaataacggagggttcagatatgaacaacaatcatgtttatgatatgctcgtggtggggggcggaccgggcggctacaccgccgccctgtacgcggcacgggcggggctggacaccatcgtgctggaaaaactgtccgccggagggcagatggccctgaccgagcagatcgacaactatcctggctttgaggacgggatcgacggcttctctctggcggagaagatgcaaaagcaggcggagcgcttcggggcacgcagcgaatacgcagaagtcctccgcatggatctgacggcggttccaaagctcgtggagaccagcgaggggatctttctggggaaaaccgtggtgctggccaccggtgcgaaccccagaacgctgggcgtggccagagagtcggaactggtgggccggggcgtggcctactgcgccgcctgcgacgggatgttttacaagggcaaaacggtggtcgtggtgggcggcggcaattccgccgcggcagatgccctccttctcagccgcgttgcgaaaaaagtgatcctcgtccaccgcagagacaccctgcgggccaccaagatctatcacgagccgctggcacaggccgaaaacgtggaattccgttggaacagcgtcgtttccgcgctgctttccggggacaggctgaccggcgtccgcctgcgggacaccgtcaccggtgaggaaagcgtggtggactgcgacggcgtatttgtcagcgtgggccgacagcccgccacggcgctggcggtgggtcaactggcgctggacggcggcggctatatcgtggccggagagaccacggaaaccagtattcccggcgtatacgccgtgggcgacgtgaggacgaagcccctccgtcaggtggtcaccgccgtggcggacggcgcggtggcagtccacatggcggagaaatatatcgcggaaaaccgataagggaggtagattgaaaaagccatgtttaaggtcaggccggatacgaccgcagtggggatgccgacatatctgcaaggcaaactgccagactgatggtagataagataacccatgtaagatcgggagatatgttgtctctccatatccagtccacacaacagtgagcaactgaacacaaaacacagccacagatgtactctgcggctgtgtttttatgcgtagtattaccgcgtgacaagcggttttactgtgacggcgtcacataatttgagaaaatcggcttcgaggcagcttttggagcacaaccgtaaagatgatgtggttacgtttgaacaattgggcgtagacaggttgtttgtggatgagagccaagcgtttaagaacctctacttgtacacgaaaatgcgtaatgtcgcaggtttgagtacgagcgaggcgcaaaaatccagcgatatgttcggcaagtgccgctatttggacgagatcaccggagggcgtggcgtgatttttgcaacaggtacgcccctgagcaacagcatgaccgagatgtataccctaatgcgttatcttcagtacaacaccttacagcagaaagggctgacccattttgatgcgtgggcatccaccttcggtgagacgaccacggccattgaacttgcgcccgagggctatactttaataggacgataaacttgattgtcctaaattgaaagattccataagaaaggaggtagaacaaatgcctaaagaaccaaaaattaccgcactctatgagcgtttgtcaagagatgatgatcttgctggtgaatcgaattccatcaccaaccaaaagaaatatctggaagattacgcccaaaagaacggcttcaagaacatccgccattttacggatgatggcttttcaggtgtgaatttcaatcgtcccggctttcaatctctaataaaagaggtagaagcaggaaatgtcgannnnnnnnnnnnnnnnnnnnnnnnnnnnnnnnnnnnnnnnnnnnnnnnnnnnnnnnnnnnnnnnnnnnnnnnnnnnnnnnnnnnnnnnnnnnnnnnnnnnnnnnnnnnnnnnnnnnnnnnnnnnnnnnnnnnnnnnnnnnnnnnnnnnnnnnnnnnnnnnnnnnnnnnnnnnnnnnnnnnnnnnnnnnnnnnnnnnnnnnnnnnnnnnnnnnnnnnnnnnnnnnnnnnnnnnatttttgaatattatgaacgaatggtatgccaaagacacgagcaataaaatcaaggctgtgttcgatgcccggatgaaagatggaaaacgttgcagcggctctattccgtatggatataaccgtttgccgaacgacaagcagacacttgttgttgatccggtggcatccgaagtcgtaaagcgcatttttcttcttgcgaacgaaggaaaaagcccacgggcaatcgcagaactattgacagaggaaaaagtcctgattcctgctgcatacgcaaagaaatatcacccagagcagtacaatgggacaaagttctccaatccgtacctgtggggcacctcctccgtaagaacaattttaggtcggcaggaaaaagaggatgtggagcatgatcatcaccaaagagacggactacgcgctgcgcattttgcgggtgctgctggacggggagaagcattcggtggccgagatgtcggaaactgaattgatccccaatcagtttgcctaccagattctgcgcaagctctccgccggcaatttggtgcgggtgagccgcggcgctctcggcggctgcgagctgtcctgcgatctggacgcgacctccctctacgatctcatgggggtcgtgggggagcggggcatcctgtgcgcctgcatggagccgggatatgaatgccgctggcaggacaagcatgggcggtgcaccatccactgtcagctggcggccttgcagcaaaagcaggacgaggcgttccgtgccgtgagcctgcgcaggctgctgaccggcggatccgattcccaagatacaagcaagctgtaaaattttaaaaggaggtacccctatgctgtttcaaaccacgtcggcgcacgaagagctgcgcgcgaagatccggagttttgcggaggaggagatcaagccagaaagctcatcatagcgtttttgacaacgtttcaattccgattggttctgcttcggcttttcttcacgtttctctttccaaagtgattgcagttccaaagcgaaggtttcttcatcttttagaacaaatctcgaaaagcgtttgaccgatgccaatatcagggcttcaacattatcggcactgattgaatgggcagtacagccattcacccgacttgcatatccaccacaacgataagaatattgagtagacccatcctttttactgtagtgtgtttgcaaggtcaatcttctgccgcagtcggcacaatacagatacccgcttaaacggttggtgtgcgttccccaagcagaagcacgattcactcggcatctgcgtttctgaacactatcccaaagttcttgcgatataatcggttcatgcgtgttctggaaaacgtactgttcatcttcatctgtttcttttctcttgtgaagtttgaaatttgtgcttacagattttcgtaaaacagtgtgtcccagatattcctgccgacctaaaattgttcttacggaggaggtgccccacaggtacggattggagaactttgtcccattgtactgctc

SEQ ID NO: 15 - DNA, 2023 bp, Coprococcus catus
atcaaacatgagagtttgatcctggctcaggatgaacgctggcggcgtgcttaacacatgcaagtcgaacggacgatgaagagcttgctcttcagagttagtggcggacgggtgagtaacgcgtgggtaacctgcctcatacagggggatagcagctggaaacggctgataaaaccgcataagcgcacagcatcgcatgatgcagtgtgaaaaactccggtggtatgagatggacccgcgtctgattagctggttggtgaggtaacggcccaccaaggcgacgatcagtagccggcctgagagggtgaccggccacattgggactgagacacggcccaaactcctacgggaggcagcagtggggaatattgcacaatgggggaaaccctgatgcagcgacgccgcgtgaaggaagaagtatctcggtatgtaaacttctatcagcagggaagataatgacggtacctgactaagaagccccggctaactacgtgccagcatcaaacatgagagtttgatcctggctcaggatgaacgctggcggcgtgcttaacacatgcaagtcgaacggacgatgaagagcttgctcttcagagttagtggcggacgggtgagtaacgcgtgggtaacctgcctcatacagggggatagcagctggaaacggctgataaaaccgcataagcgcacagcatcgcatgatgcagtgtgaaaaactccggtggtatgagatggacccgcgtctgattagctggttggtgaggtaacggcccaccaaggcgacgatcagtagccggcctgagagggtgaccggccacattgggactgagacacggcccaaactcctacgggaggcagcagtggggaatattgcacaatgggggaaaccctgatgcagcgacgccgcgtgaaggaagaagtatctcggtatgtaaacttctatcagcagggaagataatgacggtacctgactaagaagccccggctaactacgtgccagcagccgcggtaatacgtagggggcaagcgttatccggatttactgggtgtaaagggagcgtaggcggcggagcaagtcagaagtgaaagcccggggctcaaccccgggacggcttttgaaactgccctgcttgatttcaggagaggtaagcggaattcctagtgtagcggtgaaatgcgtagatattaggaggaacaccagtggcgaaggcggcttactggactgacaatgacgctgaggctcgaaagcgtggggagcaaacaggattagataccctggtagtccacgccgtaaacgatgaatactaggtgtcgggggccataaggctttcggtgccgcagcaaacgcaataagtattccacctggggagtacgttcgcaagaatgaaactcaaaggaattgacggggacccgcacaagcggtggagcatgtggtttaattcgaagcaacgcgaagaaccttaccaggccttgacatcccggtgaccgtcccgtaatggggacctctcttcggagcaccggtgacaggtggtgcatggttgtcgtcagctcgtgtcgtgagatgttgggttaagtcccgcaacgagcgcaacccctatgttcagtagccagcaggtaaagctgggcactctggacagactgccggggataacccggaggaaggcggggatgacgtcaaatcatcatgccccttacggcctgggctacacacgtgctacaatggcgtaaacaaagggaagcgagagggtgacctggagcgaatcccaaaaataacgtcccagttcggactgtagtctgcaacccgactacacgaagctggaatcgctagtaatcgcgaatcagcatgtcgcggtgaatacgttcccgggtcttgtacacaccgcccgtcacaccatgggagttggaaatgcccgaagtcagtgacctaaccgcaagggaggagctgccgaaggtggagccgatgactggggtgaagtcgtaacaaggtagccgtatcggaaggtgcggctggatcacctcctttcta

SEQ ID NO: 16 - DNA, 1539 bp, Eubacterium rectale
ttttaacatgagagtttgatcctggctcaggatgaacgctggcggcgtgcttaacacatgcaagtcgaacgaagcactttatttgatttccttcgggactgattattttgtgactgagtggcggacgggtgagtaacgcgtgggtaacctgccttgtacagggggataacagttggaaacggctgctaataccgcataagcgcacggcatcgcatgatgcagtgtgaaaaactccggtggtataagatggacccgcgttggattagctagttggtgaggtaacggcccaccaaggcgacgatccatagccgacctgagagggtgaccggccacattgggactgagacacggcccaaactcctacgggaggcagcagtggggaatattgcacaatgggcgaaagcctgatgcagcgacgccgcgtgagcgaagaagtatttcggtatgtaaagctctatcagcagggaagataatgacggtacctgactaagaagcaccggctaaatacgtgccagcagccgcggtaatacgtatggtgcaagcgttatccggatttactgggtgtaaagggagcgcaggcggtgcggcaagtctgatgtgaaagcccggggctcaaccccggtactgcattggaaactgtcgtactagagtgtcggaggggtaagcggaattcctagtgtagcggtgaaatgcgtagatattaggaggaacaccagtggcgaaggcggcttactggacgataactgacgctgaggctcgaaagcgtggggagcaaacaggattagataccctggtagtccacgccgtaaacgatgaatactaggtgttgggaagcattgcttctcggtgccgtcgcaaacgcagtaagtattccacctggggagtacgttcgcaagaatgaaactcaaaggaattgacggggacccgcacaagcggtggagcatgtggtttaattcgaagcaacgcgaagaaccttaccaagtcttgacatccttctgaccggtacwtaatcgtaccttctcttcggagcaggagtgacaggtggtgcatggttgtcgtcagctcgtgtcgtgagatgttgggttaagtcccgcaacgagcgcaacccttatctttagtagccagcggttaagccgggcactctagagagactgccagggataacctggaggaaggcggggatgacgtcaaatcatcatgccccttatgacttgggctacacacgtgctacaatggcgtaaacaaagggaagcaaagctgtgaagccgagcaaatctcaaaaataacgtctcagttcggactgtagtctgcaacccgactacacgaagctggaatcgctagtaatcgcagatcagaatgctgcggtgaatacgttcccgggtcttgtacacaccgcccgtcacaccatgggagttgggaatgcccgaagccagtgacctaaccgaaaggaaggagctgtcgaaggcaggctcgataactggggtgaagtcgtaacaaggtagccgtatcggaaggtgcggctggatcacctcctttcta

SEQ ID NO: 17 - DNA, 1533 bp, Alistipes putredinis
tatacaatggagagtttgatcctggctcaggatgaacgctagcggcaggcttaacacatgcaagtcgaggggcagcataatggatagcaatatctatggtggcgaccggcgcacgggtgcgtaacgcgtatgcaacctacctttaacagggggataacactgagaaattggtactaataccccataatatcatagaaggcatcttttatggttgaaaattccgatggttagagatgggcatgcgttgtattagctagttggtggggtaacggctcaccaaggcgacgatacatagggggactgagaggttaaccccccacactggtactgagacacggaccagactcctacgggaggcagcagtgaggaatattggtcaatggacgcaagtctgaaccagccatgccgcgtgcaggatgacggctctatgagttgtaaactgcttttgtacgagggtaaacgcagatacgtgtatctgtctgaaagtatcgtacgaataaggatcggctaactccgtgccagcagccgcggtaatacggaggattcaagcgttatccggatttattgggtttaaagggtgcgtaggcggtttgataagttagaggtgaaatttcggggctcaaccctgaacgtgcctctaatactgttgagctagagagtagttgcggtaggcggaatgtatggtgtagcggtgaaatgcttagagatcatacagaacaccgattgcgaaggcagcttaccaaactatatctgacgttgaggcacgaaagcgtggggagcaaacaggattagataccctggtagtccacgcagtaaacgatgataactcgttgtcggcgatacacagtcggtgactaagcgaaagcgataagttatccacctggggagtacgttcgcaagaatgaaactcaaaggaattgacgggggcccgcacaagcggaggaacatgtggtttaattcgatgatacgcgaggaaccttacccgggcttgaaagttagcgacgattcttgaaagaggatttcccttcggggcgcgaaactaggtgctgcatggttgtcgtcagctcgtgccgtgaggtgtcgggttaagtcccataacgagcgcaacccctaccgttagttgccatcaggtgaagctgggcactctggcgggactgccggtgtaagccgagaggaaggtggggatgacgtcaaatcagcacggcccttacgtccggggctacacacgtgttacaatggtaggtacagagggcagctacccagcgatgggatgcgaatctcgaaagcctatctcagttcggattggaggctgaaacccgcctccatgaagttggattcgctagtaatcgcgcatcagccatggcgcggtgaatacgttcccgggccttgtacacaccgcccgtcaagccatgggagccgggggtgcctgaagttcgtgaccgcaaggagcgacctagggcaaaactggtgactggggctaagtcgtaacaaggtagccgtaccggaaggtgcggctggaacacctcctttctg

SEQ ID NO: 18 - DNA, 1538 bp, Barnesiella intestinihominis
gatacaacgaagagtttgatcctggctcaggatgaacgctagcgacaggcctaacacatgcaagtcgaggggcagcgaagaggtagcaatacctttgtcggcgaccggcgcacgggtgagtaacacgtatgcaatccacctgtaacagggggataacccggagaaatccggactaataccccataatatgggcgctccgcatggagagcccattaaagagagcaattttggttacagacgagcatgcgctccattagccagttggcggggtaacggcccaccaaagcgacgatggataggggttctgagaggaaggtcccccacattggaactgagacacggtccaaactcctacgggaggcagcagtgaggaatattggtcaatggtcggcagactgaaccagccaagtcgcgtgagggaagacggccctacgggttgtaaacctcttttgtcggagagtaaagtacgctacgtgtagtgtattgcaagtatccgaagaaaaagcatcggctaactccgtgccagcagccgcggtaatacggaggatgcaagcgttatccggatttattgggtttaaagggtgcgtaggcggcacgccaagtcagcggtgaaatttccgggctcaacccggagtgtgccgttgaaactggcgagctagagtacacaagaggcaggcggaatgcgtggtgtagcggtgaaatgcatagatatcacgcagaaccccgattgcgaaggcagcctgctagggtgaaacagacgctgaggcacgaaagcgtgggtatcgaacaggattagataccctggtagtccacgcagtaaacgatgaatactaactgtttgcgatacaatgtaagcggtacagcgaaagcgttaagtattccacctggggagtacgccggcaacggtgaaactcaaaggaattgacgggggcccgcacaagcggaggaacatgtggtttaattcgatgatacgcgaggaaccttacccgggctcaaacgcagggggaatatatatgaaagtatatagctagcaatagtcacctgcgaggtgctgcatggttgtcgtcagctcgtgccgtgaggtgtcggcttaagtgccataacgagcgcaacccctatcgacagttactaacgggtcaagccgaggactctgtcgagactgccggcgcaagccgcgaggaaggtggggatgacgtcaaatcagcacggcccttacgtccggggcgacacacgtgttacaatggcaggtacagaaggcagccagtcagcaatgacgcgcgaatcccgaaaacctgtctcagttcggattggagtctgcaacccgactccatgaagctggattcgctagtaatcgcgcatcagccatggcgcggtgaatacgttcccgggccttgtacacaccgcccgtcaagccatggaagccgggagtacctgaagcatgcaaccgcaaggagcgtacgaaggtaataccggtaactggggctaagtcgtaacaaggtagccgtaccggaaggtgcggctggaacacctcctttctg

SEQ ID NO: 19 - DNA, 1540 bp, Roseburia hominis
ctataacatgagagtttgatcctggctcaggatgaacgctggcggcgtgcttaacacatgcaagtcgaacgaagcactttaattgatttcttcggaatgaagtttttgtgactgagtggcggacgggtgagtaacgcgtgggtaacctgcctcatacagggggataacagttggaaacgactgctaataccgcataagcgcacaggattgcatgatccagtgtgaaaaactccggtggtatgagatggacccgcgtctgattagccagttggcggggtaacggcccaccaaagcgacgatcagtagccgacctgagagggtgaccggccacattgggactgagacacggcccaaactcctacgggaggcagcagtggggaatattgcacaatgggggaaaccctgatgcagcgacgccgcgtgagcgaagaagtatttcggtatgtaaagctctatcagcagggaagaagaatgacggtacctgactaagaagcaccggctaaatacgtgccagcagccgcggtaatacgtatggtgcaagcgttatccggatttactgggtgtaaagggagcgcaggcggtacggcaagtctgatgtgaaatcccggggctcaaccccggtactgcattggaaactgtcggactagagtgtcggaggggtaagtggaattcctagtgtagcggtgaaatgcgtagatattaggaggaacaccagtggcgaaggcggcttactggacgattactgacgctgaggctcgaaagcgtggggagcaaacaggattagataccctggtagtccacgccgtaaacgatgaatactaggtgtcggggagcattgctcttcggtgccgcagcaaacgcaataagtattccacctggggagtacgttcgcaagaatgaaactcaaaggaattgacggggacccgcacaagcggtggagcatgtggtttaattcgaagcaacgcgaagaaccttaccaagtcttgacatcccactgacaaagtatgtaatgtactttctcttcggagcagtggtgacaggtggtgcatggttgtcgtcagctcgtgtcgtgagatgttgggttaagtcccgcaacgagcgcaacccctattcttagtagccagcggttcggccgggcactctagggagactgccagggataacctggaggaaggtggggatgacgtcaaatcatcatgccccttatgacttgggctacacacgtgctacaatggcgtaaacaaagggaagcaatcccgcgagggggagcaaatctcaaaaataacgtctcagttcggactgtagtctgcaactcgactacacgaagctggaatcgctagtaatcgcgaatcagaatgtcgcggtgaatacgttcccgggtcttgtacacaccgcccgtcacaccatgggagttggtaatgcccgaagtcagtgacccaaccgcaaggagggagctgccgaaggcaggactgataactggggtgaagtcgtaacaagggtacgccgtatcggaaggtgcggctggatcacctcctttcta

SEQ ID NO: 20 - DNA, 1454 bp, Dorea longicatena
agattcttcggatgatttcctttgtgactgagcggcggacgggtgagtaacgcgtgggtaacctgcctcatacagggggataacagttagaaatgactgctaataccgcataagaccacggtaccgcatggtacagtggtaaaaactccggtggtatgagatggacccgcgtctgattaggtagttggtggggtaacggcctaccaagccgacgatcagtagccgacctgagagggtgaccggccacattgggactgagacacggcccagactcctacgggaggcagcagtggggaatattgcacaatggaggaaactctgatgcagcgacgccgcgtgaaggatgaagtatttcggtatgtaaacttctatcagcagggaagaaaatgacggtacctgactaagaagccccggctaactacgtgccagcagccgcggtaatacgtagggggcaagcgttatccggatttactgggtgtaaagggagcgtagacggcacggcaagccagatgtgaaagcccggggctcaaccccgggactgcatttggaactgctgagctagagtgtcggagaggcaagtggaattcctagtgtagcggtgaaatgcgtagatattaggaggaacaccagtggcgaaggcggcttgctggacgatgactgacgttgaggctcgaaagcgtggggagcaaacaggattagataccctggtagtccacgccgtaaacgatgactgctaggtgtcgggtggcaaagccattcggtgccgcagctaacgcaataagcagtccacctggggagtacgttcgcaagaatgaaactcaaaggaattgacggggacccgcacaagcggtggagcatgtggtttaattcgaagcaacgcgaagaaccttacctgatcttgacatcccgatgaccgcttcgtaatggaagtttttcttcggaacatcggtgacaggtggtgcatggttgtcgtcagctcgtgtcgtgagatgttgggttaagtcccgcaacgagcgcaacccctatcttcagtagccagcaggttaagctgggcactctggagagactgccagggataacctggaggaaggtggggatgacgtcaaatcatcatgccccttatgaccagggctacacacgtgctacaatggcgtaaacaaagagaagcgaactcgcgagggtaagcaaatctcaaaaataacgtctcagttcggattgtagtctgcaactcgactacatgaagctggaatcgctagtaatcgcagatcagaatgctgcggtgaatacgttcccgggtcttgtacacaccgcccgtcacaccatgggagtcagtaacgcccgaagtcagtgacccaaccgtaaggagggagctgccgaaggtgggaccgataactggggtgaagtcgtaacaaggtagccgtatcggaaggtgcggctggatcacctcctttcta

SEQ ID NO: 21 - DNA, 1447 bp, Faecalibacterium prausnitzii
gagcgagagagagcttgctttcttgagcgagtggcgaacgggtgagtaacgcgtgaggaacctgcctcaaagagggggacaacagttggaaacgactgctaataccgcataagcccacggctcggcatcgagcagagggaaaaggagcaatccgctttgagatggcctcgcgtccgattagctagttggtgaggtaacggcccaccaaggcgacgatcggtagccggactgagaggttgaacggccacattgggactgagacacggcccagactcctacgggaggcagcagtggggaatattgcacaatgggggaaaccctgatgcagcgacgccgcgtggaggaagaaggtcttcggattgtaaactcctgttgttgaggaagataatgacggtactcaacaaggaagtgacggctaactacgtgccagcagccgcggtaaaacgtaggtcacaagcgttgtccggaattactgggtgtaaagggagcgcaggcgggaaggcaagttggaagtgaaatccatgggctcaacccatgaactgctttcaaaactgtttttcttgagtagtgcagaggtaggcggaattcccggtgtagcggtggaatgcgtagatatcgggaggaacaccagtggcgaaggcggcctactgggcaccaactgacgctgaggctcgaaagtgtgggtagcaaacaggattagataccctggtagtccacactgtaaacgatgattactaggtgttggaggattgaccccttcagtgccgcagttaacacaataagtaatccacctggggagtacgaccgcaaggttgaaactcaaaggaattgacgggggcccgcacaagcagtggagtatgtggtttaattcgacgcaacgcgaagaaccttaccaagtcttgacatcctgcgacgcacatagaaatatgtgtttccttcgggacgcagagacaggtggtgcatggttgtcgtcagctcgtgtcgtgagatgttgggttaagtcccgcaacgagcgcaacccttatggtcagttactacgcaagaggactctggccagactgccgttgacaaaacggaggaaggtggggatgacgtcaaatcatcatgccctttatgacttgggctacacacgtactacaatggcgttaaacaaagagaagcaagaccgcgaggtggagcaaaactcagaaacaacgtcccagttcggactgcaggctgcaactcgcctgcacgaagtcggaattgctagtaatcgcagatcagcatgctgcggtgaatacgttcccgggccttgtacacaccgcccgtcacaccatgagagccggggggacccgaagtcggtagtctaaccgcaaggaggacgccgccgaaggtaaaactggtgattggggtgaagtcgtaacaaggtagccgtaggagaacctgcggctggatcacctcctttcta
